(19) United States
(12) Patent Application Publication
(10) Pub. No.: US 2022/0073891 A1
(43) Pub. Date: Mar. 10, 2022

(54) SYSTEMS, METHODS, AND COMPOSITIONS FOR RNA-GUIDED RNA-TARGETING CRISPR EFFECTORS

(71) Applicant: MASSACHUSETTS INSTITUTE OF TECHNOLOGY, Cambridge, MA (US)

(72) Inventors: Omar Abudayyeh, Cambridge, MA (US); Jonathan Gootenberg, Cambridge, MA (US)

(21) Appl. No.: 17/365,777

(22) Filed: Jul. 1, 2021

Related U.S. Application Data
(60) Provisional application No. 63/208,606, filed on Jun. 9, 2021.
(60) Provisional application No. 63/073,898, filed on Sep. 2, 2020.

(51) Int. Cl. C12N 9/22; C12N 15/11; C12N 9/78

(52) U.S. Cl. CPC C12N 9/22; C12N 15/11; C12N 9/78; A61K 38/00; C12Y 305/04005; C12N 2310/20; C12N 2320/33; C12Y 305/04004

(57) ABSTRACT

This disclosure provides systems, methods, and compositions for RNA-guided RNA-targeting CRISPR effectors for the treatment of diseases as well as diagnostics. In some embodiments, nucleotide deaminase functionalized CRISPR systems for RNA editing RNA knockdown, viral resistance, splicing modulation, RNA tracking, translation modulation, and epi-transcriptomic modifications are disclosed.

### RELATED APPLICATIONS

[0001] This application claims priority to U.S. Provisional Application Nos. 63/073,898 filed Sep. 2, 2020 and 63/208,606, filed Jun. 9, 2021, the entire contents of which are hereby incorporated by reference in their entirety.

### STATEMENT REGARDING FEDERALLY SPONSORED RESEARCH OR DEVELOPMENT

[0002] This invention was made with government support under Grant No. R21 AI149694 awarded by the National Institutes of Health (NIH). The government has certain rights in the invention.

### SEQUENCE LISTING

[0003] The instant application contains a Sequence Listing which has been submitted electronically in ASCII format and is hereby incorporated by reference in its entirety. Said ASCII copy, created on Sep. 10, 2021, is named 719269_083474_015_SQL.txt and is 891 KB in size.

### TECHNOLOGY FIELD

[0004] The subject matter disclosed herein is generally related to systems, methods, and compositions for RNA-guided RNA-targeting CRISPR effectors for the treatment of diseases and diagnostics.

### BACKGROUND

[0005] RNA targeting tools for genetic engineering are important to study RNA biology and develop RNA therapeutics. These tools can regulate intracellular and intercellular target-gene functions and expressions and manipulate specific target-genomic information. In contrast to DNA targeting tools, only a few RNA targeting tools for CRISPR applications have been developed, and these RNA specific tools present challenges. For instance, protein complexes for CRISPR RNA editing can have a weak activity in mammalian cells and present collateral effects which can be toxic in some cell types. Also, the size of the RNA editing tools can be a significant barrier to their use, as technologies such as programmable activation cannot be delivered in mouse models using common methods such as adeno-associated vectors (AAV). Development of effective gene and cell therapies requires genome editing tools and delivery technologies that can meet the demands for cell type specificity, large payload sizes, and efficient integration of diverse and large sequences. Many applications, including single-vector homology directed repair (HDR), CRISPR base editing, gene activation, and large gene delivery, are limited by AAV size restrictions. Thus, there remains a need for more effective tools for gene correction and delivery.

### SUMMARY

[0006] The present invention is directed to systems, methods, and compositions for RNA-guided RNA-targeting CRISPR effectors for the treatment of diseases and diagnostics. It also pertains to nucleotide deaminase functionalized CRISPR systems for RNA editing RNA knockdown, viral resistance, splicing modulation, RNA tracking, translation modulation, and epi-transcriptomic modifications.

[0007] In one aspect, a composition that cleaves an RNA target is discussed, which comprises a guide RNA that specifically hybridizes to the RNA target, and a polypeptide comprising an amino acid sequence 85% identical to an amino acid sequence selected from the group consisting of SEQ ID NOs: 1-32 and 632. The amino acid sequence can be SEQ ID NO: 1. The polypeptide can comprise a glutamate at a position corresponding to position 70 of SEQ ID NO:1, an aspartate at a position corresponding to position 429 of SEQ ID NO:1, an aspartate at a position corresponding to position 487 of SEQ ID NO:1, and/or an aspartate at a position corresponding to position 654 of SEQ ID NO:1. If desired, the polypeptide can comprise an amino acid sequence 90% identical to the amino acid sequence of SEQ ID NO:1. If desired, the polypeptide can comprise an amino acid sequence 95% identical to the amino acid sequence of SEQ ID NO:1. If desired, the polypeptide can comprise an amino acid sequence 99% identical to the amino acid sequence of SEQ ID NO:1. If desired, the polypeptide can be the amino acid sequence of SEQ ID NO:1.

[0008] Yet in another aspect, the guide RNA comprises a mismatch distance that is 20-65% of the length of the guide. If desired, the guide RNA can comprise a mismatch that is about 20 to about 30 nucleotides from the non-pairing C of the guide RNA. If desired, the guide RNA can have a sequence with a length of from about 20 to about 53 nucleotides (nt), preferably from about 25 to about 53 nt, more preferably from about 29 to about 53 nt or from about 40 to about 50 nt. If desired, the guide RNA can be a pre-crRNA. If desired, the guide RNA can be a mature crRNA.

[0009] Yet in another aspect, the RNA target can be a single-strand RNA (ssRNA). If desired, the RNA target can be in a cell. The cell can be a prokaryotic cell. The cell can be a eukaryotic cell. The eukaryotic cell can be a mammalian cell. The mammalian cell can be a human cell.

[0010] Yet in another aspect, the polypeptide can comprise a deaminase domain. The deaminase can be selected from the group consisting of an adenosine deaminase, a cytidine deaminase, and a catalytic domain thereof. If desired, the deaminase can be an adenosine deaminase. If desired, the deaminase domain can comprise an amino acid sequence 85% identical to an amino acid sequence selected from the group consisting of SEQ ID NOs: 25-31. If desired, the deaminase domain can comprise an amino acid sequence 85% identical to an amino acid sequence selected from the group consisting of SEQ ID NOs: 32-42.

[0011] Yet in another aspect, a nucleic acid molecule encoding the polypeptide is discussed. The nucleic acid molecule can encode the guide RNA.

[0012] Yet in another aspect, a vector comprising the nucleic acid molecule is discussed.

[0013] Yet in another aspect, a cell comprising the composition, the nucleic acid molecule or the vector is discussed. If desired, the cell can be a prokaryotic cell. If desired, the cell can be a eukaryotic cell. The eukaryotic cell can be a mammalian cell. The mammalian cell can be a human cell.

[0014] Yet in another aspect, a method of cleaving an RNA target in a cell is discussed, which comprises providing to the cell the composition, the nucleic acid molecule or the vector. If desired, the RNA target can be an ssRNA.

[0015] Yet in another aspect, a method of stabilizing an RNA target in a cell is discussed, which comprises providing to the cell the composition, the nucleic acid molecule or the vector. If desired, the RNA target can be an ssRNA.

[0016] Yet in another aspect, a method of affecting translation of an RNA target in a cell is discussed, which comprises providing to the cell the composition, the nucleic acid molecule or the vector. If desired, the RNA target can be an ssRNA.

[0017] Yet in another aspect, a method of treating a genetically inherited disease in a subject in need thereof is discussed, which comprises administering to the subject an effective amount of the composition, the nucleic acid molecule or the vector, wherein the genetically inherited disease involves a guanosine to adenosine change in the genome of the subject. The genetically inherited disease can be selected from the group consisting of Meier-Gorlin syndrome; Seckel syndrome 4; Joubert syndrome 5; Leber congenital amaurosis 10; Charcot-Marie-Tooth disease, type 2; leukoencephalopathy; Usher syndrome, type 2C; spinocerebellar ataxia 28; glycogen storage disease type III; primary hyperoxaluria, type I; long QT syndrome 2; Sjögren-Larsson syndrome; hereditary fructosuria; neuroblastoma; amyotrophic lateral sclerosis type 9; Kallmann syndrome 1; limb-girdle muscular dystrophy, type 2L; familial adenomatous polyposis 1; familial type 3 hyperlipoproteinemia; Alzheimer's disease, type 1; metachromatic leukodystrophy; and cancer.

[0018] Yet in another aspect, a method of treating a genetically inherited disease in a subject in need thereof is discussed, which comprises administering to the subject an effective amount of the composition, the nucleic acid molecule or the vector, wherein the genetically inherited disease is a pre-termination disease.

[0019] Yet in another aspect, a method of altering splicing of a pre-mRNA in a cell is discussed, which comprises administering to the cell an effective amount of the composition, the nucleic acid molecule or the vector.

[0020] Yet in another aspect, a method of changing microRNA targets in a subject in need is discussed, which comprises administering to the subject an effective amount of the composition, the nucleic acid molecule or the vector.

[0021] Yet in another aspect, a method of increasing RNA stability in a cell is discussed, which comprises administering to the cell an effective amount of the composition, the nucleic acid molecule or the vector.

[0022] Yet in another aspect, a method of modulating translation in a cell is discussed, which comprises administering to the cell an effective amount of the composition, the nucleic acid molecule or the vector.

[0023] Yet in another aspect, a method of detecting a bacterium or derivative thereof in a sample is discussed, the method comprises adding to the sample an effective amount of the composition, the nucleic acid molecule or the vector, and detecting a reporter specific to the bacterium or derivative thereof.

[0024] Yet in another aspect, a method of detecting a virus or derivative thereof in a sample is discussed, the method comprises adding to the sample an effective amount of the composition, the nucleic acid molecule or the vector, and detecting a reporter specific to the virus or derivative thereof.

[0025] These and other aspects of the applicants' teaching are set forth herein.

### BRIEF DESCRIPTION OF THE DRAWINGS

[0026] Aspects, features, benefits and advantages of the embodiments described herein will be apparent with regard to the following description, appended claims, and accompanying drawings where:

[0027] FIG. 1A is a schematic representation of RNA editing via dDisCas7-11a-NES-ADAR2 fusions that are programmed to target a specific adenosine via a cytidine mismatch for A to I editing in the guide:target RNA duplex according to embodiments of the present teachings;

[0028] FIG. 1B is a schematic of Cas7-11 expression, processing, and interference against ssRNA viruses and other ssRNA targets according to embodiments of the present teachings;

[0029] FIG. 1C illustrates the comparison of Cas7-11 features to characteristics of Cas13 and type III-A/B/C systems according to embodiments of the present teachings;

[0030] FIG. 1D illustrates hypothetical scenario for the evolution of a single-protein CRISPR-Cas effector from a multi-subunit effector complex according to embodiments of the present teachings;

[0031] FIG. 1E shows type III-E family members and type III-D2 loci architecture and multiple alignment of representative orthologs, wherein CRISPR array symbols are not representative of the number of spacers in the array according to embodiments of the present teachings;

[0032] FIG. 1F illustrates multiple alignments of representative Cas7-11 orthologs showing conservation of the residues involved in catalysis (D177) according to embodiments of the present teachings;

[0033] FIG. 1G illustrates multiple alignments of representative Cas7-11 orthologs showing conservation of the residues involved in catalysis (D429) according to embodiments of the present teachings;

[0034] FIG. 1H illustrates multiple alignments of representative Cas7-11 orthologs showing conservation of the residues involved in catalysis (D654) according to embodiments of the present teachings;

[0035] FIG. 1I illustrates multiple alignments of representative Cas7-11 orthologs showing conservation of the residues involved in catalysis (D745, D758) according to embodiments of the present teachings;

[0036] FIG. 1J illustrates multiple alignments of representative Cas7-11 orthologs showing conservation of the residues involved in catalysis (E959) according to embodiments of the present teachings;

[0037] FIG. 1K illustrates multiple alignments of representative Cas7-11 orthologs showing conservation of the residues involved in catalysis (E998) according to embodiments of the present teachings;

[0038] FIG. 2A illustrates tree of type III-D2 and III-E effectors based on Cas7-11 and Cas7×3 multiple alignment via a computational discovery pipeline according to embodiments of the present teachings;

[0039] FIG. 2B is a schematic of a typical type III-E Cas7-11 locus and type III-D2 Cas7×3 locus wherein the inset shows the multiple Cas7-like domains of Cas7-11 including a putative small subunit Cas11 domain and an uncharacterized insertion in the Cas7-like domain 5 according to embodiments of the present teachings;

[0040] FIG. 2C illustrates a native expression of a CRISPR array associated with DisCas7-11 according to embodiments of the present teachings;

[0041] FIG. 2D is a schematic representation of a DR secondary structure and a scissor denoting the cleavage site for processing and maturation according to embodiments of the present teachings;

[0042] FIG. 3A illustrates the CRISPR array screen of RNA-guided RNA-targeting Cas7-11 for all crRNAs targeting the MS2 phage genome according to embodiments of the present teachings;

[0043] FIG. 3B is a diagram showing results of the MS2 interference screen (for the MAS targeting spacers) according to embodiments of the present teachings;

[0044] FIG. 3C is a diagram showing results of the MS2 interference screen (for the non-targeting spacers) according to embodiments of the present teachings;

[0045] FIG. 3D are images of plaque dilution assays for MS2 targeting spacer and non-targeting spacer according to embodiments of the present teachings;

[0046] FIG. 3E is a diagram of the number of DisCas7-11a spacers that display survival enrichment over a threshold of 1.7 across different phage dilution conditions according to embodiments of the present teachings;

[0047] FIG. 3F is a diagram showing Quantification of resistance conferred by top MS2-targeting DisCas7-11 spacers compared against a panel of 4 non-targeting spacers according to embodiments of the present teachings;

[0048] FIG. 3G is a diagram showing the quantification of resistance conferred by two MS2-targeting DisCas7-11 spacers compared against a panel of 6 non-targeting spacers according to embodiments of the present teachings;

[0049] FIG. 3H illustrates the RFP knockdown assay containing a DisCas7-11 and spacers expression vector co-transformed with an RFP-expressing vector according to embodiments of the present teachings;

[0050] FIG. 3I is a diagram of the DisCas7-11-mediate RFP knockdown by multiple targeting spacers normalized to a non-targeting condition as determined by flow cytometry according to embodiments of the present teachings;

[0051] FIG. 3J is a schematic of the DisCas7-11a full locus with TPR-CHAT nearby and DisCas7-11a effector expressed alone with TPR-CHAT according to embodiments of the present teachings;

[0052] FIG. 3K is a diagram of the MS2 interference activity of DisCas7-11a in the full locus and as a single effector with and without Csx29 expression according to embodiments of the present teachings;

[0053] FIG. 4A illustrates a CRISPR array processing assay for DisCas7-11 according to embodiments of the present teachings;

[0054] FIG. 4B illustrates the in vitori cleavage of ssRNA 1 target according to embodiments of the present teachings;

[0055] FIG. 4C illustrates the cleavage of EGFP ssRNA at multiple sites with tiled crRNAs according to embodiments of the present teachings;

[0056] FIG. 4D illustrates the protospacer flanking site (PFS) sequence screen showing in vitro cleavage of randomized PFS targets and lack of sequence preference flanking the target site for DisCas7-11 cleavage according to embodiments of the present teachings;

[0057] FIG. 4E is a diagram of the kinetics of fluorescence due to RnaseAlert collateral cleavage by DisCas7-11 or LwaCas13a targeting and non-targeting guides against the MS2 RNA target according to embodiments of the present teachings;

[0058] FIG. 4F illustrates the processing activity of a synthetic DisCas7-11 CRISPR array by DisCas7-11 protein with predicted catalytic processing mutants in the protein insert region with a characteristic K×Y×H catalytic according to embodiments of the present teachings;

[0059] FIG. 4G is the graph showing the measurement of bacterial growth (OD600) during target interference by DisCas7-11 and LwaCas13 according to embodiments of the present teachings;

[0060] FIG. 5A is a schematic of the protein domains of DisCas7-11 with putative catalytic residues highlighted in Cas7-like domains 3 and 4 according to embodiments of the present teachings;

[0061] FIG. 5B illustrates that the cleavage of synthetic ssRNA target with two cRNAs and wild type, D429A, D654A, and D429A/D654A DisCas7-11 proteins according to embodiments of the present teachings;

[0062] FIG. 5C illustrates the processing of a synthetic DisCas7-11 CRISPR array by catalytic DisCas7-11 mutants according to embodiments of the present teachings;

[0063] FIG. 5D is a diagram showing the MS2 phage interference in bacteria according to embodiments of the present teachings;

[0064] FIG. 5E is a diagram showing the RFP knockdown in E. coli that is prevented by the catalytic mutation D429A/D654A in DisCas7-11 according to embodiments of the present teachings;

[0065] FIG. 5F illustrates the DisCas7-11:crRNA complex binding to a complementary MS2 ssRNA target that is determined by electrophoretic mobility shift assay (EMSA) according to embodiments of the present teachings;

[0066] FIG. 6A illustrates DisCas7-11 guides targeting multiple sites on a synthetic 100 nt EGFP ssRNA according to embodiments of the present teachings;

[0067] FIG. 6B are images of cleavage patterns of each EGFP-targeting guide incubated with DisCas7-11 on a 3′ labeled EGFP ssRNA according to embodiments of the present teachings;

[0068] FIG. 6C illustrates DisCas7-11 that is incubated with a panel of crRNAs targeting either MS2 ssRNA or ssRNA target 2, two targets of equivalent length (153 nt) according to embodiments of the present teachings;

[0069] FIG. 6D are images of cleavage patterns of each guide incubated with MS2 ssRNA or ssRNA target 2 according to embodiments of the present teachings;

[0070] FIG. 7A tbc is a schematic of three Cas7-11 orthologs (GwCas7-11, CjcCas7-11, and DisCas7-11) according to embodiments of the present teachings;

[0071] FIG. 7B illustrates multiple sequence alignments of the DR sequences for GwCas7-11, CjcCas7-11, and DisCas7-11 according to embodiments of the present teachings;

[0072] FIG. 7C illustrates the activity of Cas7-11 from Candidatus Jettenia caeni (CjcCas7-11) according to embodiments of the present teachings;

[0073] FIG. 7D illustrates the activity of Cas7-11 from groundwater metagenomes (GwCas7-11) according to embodiments of the present teachings;

[0074] FIG. 7E illustrates the MS2 ssRNA target cleavage by GwCas7-11 and CjcCas7-11 incubated with their cognate crRNAs complementary to the MS2 ssRNA target according to embodiments of the present teachings;

[0075] FIG. 7F illustrates the incubation of GwCas7×3 and CjcCas7-11 proteins with their cognate crRNAs complementary to the MS2 ssRNA target at varying positions along the target according to embodiments of the present teachings;

[0076] FIG. 8A is a schematic of a luciferase reporter assay for RNA knockdown using a vector expressing human codon-optimized DisCas7-11 and guide RNA according to embodiments of the present teachings;

[0077] FIG. 8B is a diagram of the knockdown activity of DisCas7-11 against the Gaussia luciferase (Gluc) transcript normalized to two non-targeting conditions according to embodiments of the present teachings;

[0078] FIG. 8C is a diagram showing the knockdown activity of DisCas7-11 against the multiple endogenous transcripts normalized to two non-targeting according to embodiments of the present teachings;

[0079] FIG. 8D is a schematic of the DisCas7-11a guide design for programmable A-to-I editing according to embodiments of the present teachings;

[0080] FIG. 8E is a diagram showing the RNA A-to-I editing of Cypridina luciferase (Cluc) mRNA W85X mutation in mammalian cells by dead DisCas7-11a-NES-ADAR2 according to embodiments of the present teachings;

[0081] FIG. 8F is a diagram showing the RNA A-to-I editing of Cypridina luciferase (Cluc) mRNA W85X mutation in mammalian cells by dead DisCas7-11a-NES-ADAR2 according to embodiments of the present teachings;

[0082] FIG. 8G is a graph illustrating the RFP knockdown by DisCas7-11 or LwaCas13a in E. coli bacteria according to embodiments of the present teachings;

[0083] FIG. 8H is a bar graph illustrating the knockdown of Gluc mRNA in mammalian cell by DisCas7-11 with a panel of guides containing the mature DR sequence according to embodiments of the present teachings;

[0084] FIG. 8I is a bar graph illustrating knockdown of Gluc mRNA in mammalian cells by DisCas7-11 with a panel of guides of different lengths according to embodiments of the present teachings;

[0085] FIG. 8J is a bar graph comparing the number of significant off-targets when targeting the Gluc transcript in HEK293FT and U87 cells by DisCas7-11, shRNA, LwaCas13a, PspCas13b, and RfxCas13d using transcriptome-wide RNA-sequencing data according to embodiments of the present teachings;

[0086] FIG. 8K is a bar graph comparing the number of significant off-targets when targeting the Gluc transcript in HEK293FT and U87 cells by DisCas7-11, shRNA, LwaCas13a, PspCas13b, and RfxCas13d using transcriptome-wide RNA sequencing data according to embodiments of the present teachings;

[0087] FIG. 8L is a bar graph showing the knockdown activity in HEK293FT cells of DisCas7-11, shRNA, LwaCas13a, PspCas13b, and RfxCas13d against the Gaussia luciferase (Gluc) transcript normalized to corresponding non-targeting controls according to the embodiments of the present teachings;

[0088] FIG. 8M shows the transcriptome wide specificity in HEK293FT cells of RNA knockdown by DisCas7-11, RfxCas13d, and shRNA against the Gaussia luciferase (Gluc) transcript, wherein the analysis off targets is performed via significance testing (y-axis) of differentially expressed transcripts (x-axis) between targeting and non-targeting guide conditions (n=3) and the number of significant off-targets is displayed according to embodiments of the present teachings;

[0089] FIG. 8N is a bar graph showing the cell viability of HEK293FT cells during RNA knockdown by DisCas7-11, shRNA, LwaCas13a, PspCas13b, and RfxCas13d against the Gaussia luciferase (Gluc) transcript according to embodiments of the present teachings;

[0090] FIG. 8O is a bar graph of the knockdown activity in U87 glioblastoma cells of DisCas7-11, shRNA, LwaCas13a, PspCas13b, and RfxCas13d against the Gaussia luciferase (Gluc) transcript normalized to corresponding non-targeting controls according to embodiments of the present teachings;

[0091] FIG. 8P is showing the transcriptome wide specificity in U87 glioblastoma cells of RNA knockdown by DisCas7-11, PspCas13b, and RfxCas13d against the Gaussia luciferase (Gluc) transcript, wherein the analysis off targets is performed via significance testing (y-axis) of differentially expressed transcripts (x-axis) between the targeting guide condition and cells only expressing EGFP (n=3) and the number of significant off-targets is displayed according to embodiments of the present teachings;

[0092] FIG. 8Q is a graph of the cell viability of U87 glioblastoma cells during RNA knockdown by DisCas7-11, shRNA, LwaCas13a, PspCas13b, and RfxCas13d against the Gaussia luciferase (Gluc) transcript, wherein the data are mean (n=3)±s.e.m. according to embodiments of the present teachings;

[0093] FIG. 8R is a graph showing the knockdown activity in HEK293FT cells of DisCas7-11, LwaCas13a, PspCas13b, and RfxCas13d against the KRAS transcript normalized to corresponding non-targeting controls according to embodiments of the present teachings;

[0094] FIG. 8S is a graph showing the knockdown activity in HEK293FT cells of DisCas7-11, LwaCas13a, PspCas13b, and RfxCas13d against the PPIB transcript normalized to corresponding non-targeting controls according to embodiments of the present teachings;

[0095] FIG. 8T is a graph showing the knockdown activity in HEK293FT cells of DisCas7-11, LwaCas13a, PspCas13b, and RfxCas13d against the MALAT transcript normalized to corresponding non-targeting controls according to embodiments of the present teachings;

[0096] FIG. 8U is a schematic of type III-E loci from Hydrothermal vent microbial metagenome sample, Hydrothermal sediment microbial communities metagenome sample, and Deltaproteobacteria bacterium, containing HvsCas7-11, HsmCas7-11, and DpbaCas7-11 respectively according to embodiments of the present teachings;

[0097] FIG. 8V is a graph showing the knockdown activity in HEK293FT cells of HvsCas7-11, HsmCas7-11, DpbaCas7-11, and DisCas7-11 against the Gaussia luciferase (Gluc) transcript normalized to corresponding non-targeting controls, wherein for HvsCas7-11, HsmCas7-11, and DpbaCas7-11, two DR orientations (“F” and “R”) were tested, and wherein significance tests are measured by a Student's t-test (*, p-value <0.05; **, p-value <0.01) according to embodiments of the present teachings;

[0098] FIG. 8W is a graph showing the knockdown activity in HEK293FT cells of HvsCas7-11 and DisCas7-11 with two distinct target guides, with and without catalytic mutations in the Cas7-11 proteins according to embodiments of the present teachings;

[0099] FIG. 8X is a graph showing the knockdown activity in HEK293FT cells of HvsCas7-11 against the PPIB transcript normalized to corresponding non-targeting controls according to embodiments of the present teachings;

[0100] FIG. 8Y is a graph showing the knockdown activity in HEK293FT, HepG2, and primary neuron cultures of HvsCas7-11 delivered as a two vector AAV system targeting the Gaussia luciferase (Gluc) transcript, wherein values are normalized to corresponding non-targeting controls, and wherein significance tests are measured by a Student's t-test (*, p-value<0.05; **, p-value<0.01) according to embodiments of the present teachings;

[0101] FIG. 8Z is a graph showing the knockdown activity in mouse embryonic stem cells (ESCs) of DisCas7-11, HvsCas7-11, PspCas13b, and RfxCas13d against the Gaussia luciferase (Gluc) transcript normalized to corresponding non-targeting controls according to embodiments of the present teachings;

[0102] FIG. 8AA is a graph showing the ribosomal RNA integrity analysis measured by BioAnalyzer traces in U87 cells treated with DisCas7-11, shRNA, LwaCas13a, and PspCas13b targeting Gluc transcripts for knockdown (the normalized area under the curves for the 18S and 28S bands) according to embodiments of the present teachings;

[0103] FIG. 8AB are graph showing the comparison of DisCas7-11 and RfCas13d knockdown activity across multiple guides in HepG2 cells along with data on collateral activity as measured by Cluc levels, cell health (live stain), and cell toxicity (dead stain), wherein data are mean (n=3)±s.e.m according to embodiments of the present teachings;

[0104] FIG. 8AC is a graph showing the collateral activity in mouse embryonic stem cells as measured by Cluc levels during Gluc RNA knockdown by DisCas7-11, HvsCas7-11, PspCas13b, and RfxCas13d, wherein the asterisks indicate significant as measured by a Student's t-test between the targeting and non-targeting conditions of a listed ortholog condition (**, p-value<0.01), and wherein data are mean (n=3)±s.e.m according to embodiments of the present teachings;

[0105] FIG. 9A illustrates the Desulfonema ishimotonii Type III-E full locus matures crRNAs in E. coli according to embodiments of the present teachings;

[0106] FIG. 9B illustrates the single effector protein DisCas7-11 matures crRNAs in E. coli according to embodiments of the present teachings;

[0107] FIG. 9C illustrates the expression of the DisCas7-11 CRISPR array without any effector or accessory proteins according to embodiments of the present teachings;

[0108] FIG. 9D illustrates types III-E and III-D2 loci containing Cas7-11 and Cas7×3 respectively according to embodiments of the present teachings;

[0109] FIG. 10 are images of MS2 plaque dilution assays for MS2 targeting spacers, non-targeting spacers and RFP targeting spacers with DisCas7-11 according to embodiments of the present teachings;

[0110] FIG. 11A illustrates the Type III-E locus of the Desulfonema ishimotonii according to embodiments of the present teachings;

[0111] FIG. 11B is a diagram showing the phage plaque assay of the Type III-E DisCas7-11 CRISPR-Cas locus according to embodiments of the present teachings;

[0112] FIG. 11C is a diagram showing the phage plaque assay of the individual gene knock-in together with of the Type III-E DisCas7-11 CRISPR-Cas system according to embodiments of the present teachings;

[0113] FIG. 12A illustrates the in vitro transcription of pre-crRNA and processing by DisCas7-11 according to embodiments of the present teachings;

[0114] FIG. 12B is a sequence of a single spacer CRISPR array showing locations of mutated bases according to embodiments of the present teachings;

[0115] FIG. 12C is an image of the processing of transcribed pre-crRNA showing the effect of single position mutations on processing according to embodiments of the present teachings;

[0116] FIG. 12D is an image of the processing of transcribed pre-crRNA showing the effect of consecutive double mutations on processing according to embodiments of the present teachings;

[0117] FIG. 13A illustrates the processing of pre-crRNA by DisCas7-11 in the presence of different ions or chelating agents according to embodiments of the present teachings;

[0118] FIG. 13B is a schematic of in vitro cleavage of ssRNA target with DisCas7-11 and crRNA 5 according to embodiments of the present teachings;

[0119] FIG. 13C illustrates the incubation of ssRNA target with DisCas7-11 and targeting or non-targeting crRNA in the presence of different ions or chelating agents according to embodiments of the present teachings;

[0120] FIG. 13D illustrates the cleavage of ssRNA target with increasing amounts of DisCas7-11-crRNA complex from 0 nM to 233 nM according to embodiments of the present teachings;

[0121] FIG. 13E illustrates the cleavage of ssRNA target at increasing incubation periods from 0 minutes to 180 minutes according to embodiments of the present teachings;

[0122] FIG. 14A is a schematic showing sequence of DisCas7-11 crRNA 5, targeting the ssRNA target according to embodiments of the present teachings;

[0123] FIG. 14B illustrates the cleavage of ssRNA target with crRNA of varying DR and spacer lengths according to embodiments of the present teachings;

[0124] FIG. 14C is a sequence of DisCas7-11 crRNA 1 targeting the MS2 target according to embodiments of the present teachings;

[0125] FIG. 14D illustrates the cleavage of the MS2 target according to embodiments of the present teachings;

[0126] FIG. 15 is a diagram of the fluorescence of RnaseAlert reporter incubated with either DisCas7-11 or LwaCas13a targeting and non-targeting guides against MS2 ssRNA target according to embodiments of the present teachings;

[0127] FIG. 16A is a schematic showing positions of DisCas7-11 crRNA 1 and crRNA 2 targeting the MS2 target according to embodiments of the present teachings;

[0128] FIG. 16B illustrates the cleavage of a synthetic MS2 ssRNA target with two cRNAs and wild type, D429A, D654A, and D429A/D654A DisCas7-11 proteins according to embodiments of the present teachings;

[0129] FIG. 17A illustrates an EMSA assay for targeting crRNA in the absence of DisCas7-11 according to embodiments of the present teachings;

[0130] FIG. 17B illustrates the quantification of band intensities for EMSA gels according to embodiments of the present teachings;

[0131] FIG. 17C illustrates the quantification of band intensities for EMSA gels according to embodiments of the present teachings;

[0132] FIG. 17D illustrates the quantification of band intensities for EMSA gels according to embodiments of the present teachings;

[0133] FIG. 17E illustrates the quantification of band intensities for EMSA gels according to embodiments of the present teachings;

[0134] FIG. 17F illustrates the quantification of band intensities for EMSA gels according to embodiments of the present teachings;

[0135] FIG. 18A illustrates DisCas7-11 incubated with a panel of crRNAs targeting either MS2 ssRNA or ssRNA target 2, two targets of equivalent length (153 nt) according to embodiments of the present teachings;

[0136] FIG. 18B illustrates the cleavage of ssRNA 1 and MS2 ssRNA at multiple sites with tiled crRNAs, showing a varying cleavage pattern based on target position according embodiments of the present disclosures;

[0137] FIG. 18C shows the schematic of the position of the tested crRNAs along the SARS-CoV-2 ssRNA and the results from the cleavage of synthetic SARS-CoV-2 ssRNA at multiple sites with tiled crRNAs showing a varying cleavage pattern based on target position according to embodiments of the present teachings;

[0138] FIG. 18D shows the schematic of the position of the tested crRNAs along the Influenza A ssRNA target and the results from the cleavage of synthetic influenza A segment 4 HA gene ssRNA at multiple sites with tiled crRNAs according to embodiments of the present teachings;

[0139] FIG. 18E illustrates DisCas7-11a incubated with a crRNA targeting a crRNA site flanked by different sequences according to embodiments of the present teachings;

[0140] FIG. 18F illustrates DisCas7-11a incubated with a crRNA targeting a double-stranded (dsDNA) target with 5′ labeling of the bottom strand according to embodiments of the present teachings;

[0141] FIG. 18G illustrates DisCas7-11a incubated with a crRNA targeting a double-stranded (dsDNA) target with 5′ labeling of the top strand according to embodiments of the present teachings;

[0142] FIG. 19A shows the schematic of the position of the tested crRNAs along the 100 nt EGFP ssRNA target and the biochemical characterization of programmable DisCas7-11 RNA cleavage of 100 nt long and 3′ fluorescently labeled EGFP ssRNA target with tiling crRNAs according to embodiments of the present teachings;

[0143] FIG. 19B shows the schematic of the position of the tested crRNAs along the 200 nt EGFP ssRNA target and the biochemical characterization of the programmable DisCas7-11 RNA cleavage of 200 nt long and 3′ fluorescently labeled EGFP ssRNA target with tiling crRNAs according to embodiments of the present teachings;

[0144] FIG. 19C shows the schematic of the position of the tested crRNAs along the 600 nt EGFP ssRNA target and the biochemical characterization of the programmable DisCas7-11 RNA cleavage of 600 nt long and 3′ fluorescently labeled EGFP ssRNA target with tiling crRNAs according to embodiments of the present teachings;

[0145] FIG. 19D shows the DNA sequencing analysis of selected EGFP targeting crRNA conditions on an unlabeled 400 nt EGFP ssRNA target according to embodiments of the present teachings;

[0146] FIG. 19E shows the in vitro cleavage of ssRNA 1 at 37° C. with DisCas7-11 incubated with a crRNA against the 60 nt MS2 target labeled with a 5′ or 3′ Cy5 molecule, wherein the target cleavage is assessed with and without crRNA, DisCas7-11 protein, and Mg+2, and arrows on the target schematic show estimated cleavage positions of DisCas7-11 cleavage according to embodiments of the present teachings;

[0147] FIG. 19F shows cleavage of MS2 ssRNA at multiple sites with tiled crRNAs via incubation with DisCas7-11 protein, wherein MS2 ssRNA target is 5′ labeled with Cy5 according to embodiments of the present teachings; and

[0148] FIG. 19G shows in vitro cleavage of MS2 ssRNA at 37° C. with varying concentrations of DisCas7-11 incubated with a crRNA against the target with and without Csx29 protein, wherein MS2 ssRNA target is 5′ labeled with Cy5 and cleavage bands are marked by asterisks according to embodiments of the present teachings.

[0149] FIG. 20 illustrates the heterologous expression of the Candidatus Jettenia caeni Type III-E CRISPR-Cas system and associated CRISPR array in E. coli. according to embodiments of the present teachings;

[0150] FIG. 21A illustrates the processing of DisCas7-11 ortholog according to embodiments of the present teachings;

[0151] FIG. 21B illustrates the processing of GwCas7-11 ortholog according to embodiments of the present teachings.

[0152] FIG. 21C illustrates the processing of CjcCas7-11 ortholog according to embodiments of the present teachings;

[0153] FIG. 21D illustrates a comparison of target cleavages between active CjcCas7-11 and dead CjcCas7-11 according to embodiments of the present teachings;

[0154] FIG. 22A illustrates the DisCas7-11 guide design for RNA editing according to embodiments of the present teachings;

[0155] FIG. 22B is a table showing the DisCas7-11 ADAR guide designs for according to embodiments of the present teachings;

[0156] FIG. 22C is diagram showing the dDisCas7-11 correction of Cluc W85X RNA according to embodiments of the present teachings;

[0157] FIG. 22D is a diagram showing the dDisCas7-11 correction of RNA as measured by sequencing according to embodiments of the present teachings;

[0158] FIG. 22E is a diagram showing the luciferase correction that correlates to the correction percent according to embodiments of the present teachings;

[0159] FIG. 23A illustrates the modulation of protein function that requires temporal A to G modulation according to embodiments of the present teachings;

[0160] FIG. 23B illustrates the correction of mendelian disease that requires temporal A to G modulation according to embodiments of the present teachings;

[0161] FIG. 23C illustrates a slicing modulation that requires temporal A to G modulation according to embodiments of the present teachings;

[0162] FIG. 24A illustrates the initial and edited codon for protein modifications with A to G RNA editing according to embodiments of the present teachings;

[0163] FIG. 24B illustrates first, second and third position codon modifications in RNA editing according to embodiments of the present teachings;

[0164] FIG. 25 illustrates the initial codon, final codon and potential function in protein modifications with C to U RNA editing according to embodiments of the present teachings;

[0165] FIG. 26A illustrates the correction of mendelian disease that requires C to U RNA editing according to embodiments of the present teachings;

[0166] FIG. 26B illustrates the multiplexed creation of disease-protective alleles that requires C to U RNA editing according to embodiments of the present teachings;

[0167] FIG. 26C illustrates the modulation of catalytic activity that requires C to U RNA editing according to embodiments of the present teachings;

[0168] FIG. 26D illustrates alter post-translation modifications that requires C to U RNA editing according to embodiments of the present teachings;

[0169] FIG. 27A-27C are tables of Cas7-11 effectors according to embodiments of the present teachings;

[0170] FIG. 28A illustrates the targeting of DisCas7-11 RNA target in beta-lactamase (ampicillin resistance gene) and the resulting PFS determined by 20 depleted targets according to embodiments of the present teachings;

[0171] FIG. 28B illustrates the targeting of DisCas7-11 DNA target in a plasmid, with a motif corresponding to no significantly depleted PFS sequences according to embodiments of the present teachings;

[0172] FIG. 28C is a diagram showing the PFS analysis of top spacers from the MS2 phage screen (e-5 condition) in the 8 bp flanking the target region to the left according to embodiments of the present teachings;

[0173] FIG. 28D is a diagram showing the PFS analysis of top spacers from the MS2 phage screen (e-5 condition) in the 8 bp flanking the target region to the right according to embodiments of the present teachings;

[0174] FIG. 28E is a schematic of the heterologous type III-E locus of the Desulfonema ishimotonii according to embodiments of the present teachings;

[0175] FIG. 28F is a bar graph showing the phage plaque assay of the Type III-E DisCas7-11 effector alone and as part of it entire locus according to embodiments of the present teachings;

[0176] FIG. 28G is a bar graph showing the phage plaque assay of E. coli transformed with the DisCas7-11 locus containing according to embodiments of the present teachings;

[0177] FIG. 29 illustrates the DisCas7-11a cleavage of synthetic 31 nt MS2 ssRNA with a 31 nt crRNA according to embodiments of the present teachings;

[0178] FIG. 30A shows the secondary structure folding prediction of the DisCas7-11a DR according to embodiments of the present teachings;

[0179] FIG. 30B shows the secondary structure folding prediction of the CjcCas7-11b DR according to embodiments of the present teachings;

[0180] FIG. 30C shows the structure folding prediction of the GwCas7-11c DR in accordance with embodiments of the present teachings;

[0181] FIG. 31A illustrates the comparison of knockdown activity of Gluc mRNA in mammalian cells between active DisCas7-11a, catalytically inactive D429A/D654A DisCas7-11a, and GFP according to embodiments of the present teachings;

[0182] FIG. 31B illustrate the comparison of knockdown activity of endogenous mRNA in mammalian cells between active DisCas7-11a, catalytically inactive D429A/D654A DisCas7-11a, and GFP according to embodiments of the present teachings;

[0183] FIG. 32A is a diagram of the RNA A-to-I editing of Cypridinia luciferase (cluc) mRNA W85X mutation in mammalian cells by active DisCas7-11a-NES-ADAR2 or dead DisCas7-11a-NES-ADAR2 according to embodiments of the present teachings;

[0184] FIG. 32B is a diagram of the RNA A-to-I editing of Cypridinia luciferase (cluc) mRNA W85X mutation in mammalian cells by active DisCas7-11a-NES-ADAR2 or dead DisCas7-11a-NES-ADAR2 according to embodiments of the present teachings;

[0185] FIG. 33A shows the cleavage of 3′labeled targeted by incubation with RNase H according to embodiments of the present teachings;

[0186] FIG. 33B shows the cleavage of 5′labeled targeted by incubation with RNase H according to embodiments of the present teachings;

[0187] FIG. 34A shows domains and section 1 of sequence alignments of Cas nucleases according to embodiments of the present teachings;

[0188] FIG. 34B shows section 2 of sequence alignments of Cas nucleases according to embodiments of the present teachings;

[0189] FIG. 34C shows section 3 of sequence alignments of Cas nucleases according to embodiments of the present teachings;

[0190] FIG. 34D shows section 4 of sequence alignments of Cas nucleases according to embodiments of the present teachings;

[0191] FIG. 34E shows section 5 of sequence alignments of Cas nucleases according to embodiments of the present teachings;

[0192] FIG. 34F shows section 6 of sequence alignments of Cas nucleases according to embodiments of the present teachings;

[0193] FIG. 34G shows section 7 of sequence alignments of Cas nucleases according to embodiments of the present teachings;

[0194] FIG. 34H shows section 8 of sequence alignments of Cas nucleases according to embodiments of the present teachings;

[0195] FIG. 34I shows section 9 of sequence alignments of Cas nucleases according to embodiments of the present teachings;

[0196] FIG. 34J shows section 10 of sequence alignments of Cas nucleases according to embodiments of the present teachings;

[0197] FIG. 34K shows section 11 of sequence alignments of Cas nucleases according to embodiments of the present teachings;

[0198] FIG. 34L shows section 12 of sequence alignments of Cas nucleases according to embodiments of the present teachings;

[0199] FIG. 34M shows section 13 of sequence alignments of Cas nucleases according to embodiments of the present teachings;

[0200] FIG. 34N shows section 14 of sequence alignments of Cas nucleases according to embodiments of the present teachings; and

[0201] FIG. 34O shows section 15 of sequence alignments of Cas nucleases according to embodiments of the present teachings.

### DETAILED DESCRIPTION

[0202] It will be appreciated that for clarity, the following discussion will describe various aspects of embodiments of the applicant's teachings. It should be noted that the specific embodiments are not intended as an exhaustive description or as a limitation to the broader aspects discussed herein. One aspect described in conjunction with a particular embodiment is not necessarily limited to that embodiment and can be practiced with any other embodiment(s). Reference throughout this specification to “one embodiment”, “an embodiment,” “an example embodiment,” means that a particular feature, structure or characteristic described in connection with the embodiment is included in at least one embodiment of the present invention. Thus, appearances of the phrases “in one embodiment,” “in an embodiment,” or “an example embodiment” in various places throughout this specification are not necessarily all referring to the same embodiment, but may. Furthermore, the particular features, structures or characteristics may be combined in any suitable manner, as would be apparent to a person skilled in the art from this disclosure, in one or more embodiments. Furthermore, while some embodiments described herein include some but not other features included in other embodiments, combinations of features of different embodiments are meant to be within the scope of the invention. For example, in the appended claims, any of the claimed embodiments can be used in any combination.

[0203] General Definitions

[0204] Unless defined otherwise, technical and scientific terms used herein have the same meaning as commonly understood by one of ordinary skill in the art to which this disclosure pertains. Definitions of common terms and techniques in molecular biology may be found in Molecular Cloning: A Laboratory Manual, 2nd edition (1989) (Sambrook, Fritsch, and Maniatis); Molecular Cloning: A Laboratory Manual, 4th edition (2012) (Green and Sambrook); Current Protocols in Molecular Biology (1987) (F. M. Ausubel et al. eds.); the series Methods in Enzymology (Academic Press, Inc.): PCR 2: A Practical Approach (1995) (M. J. MacPherson, B. D. Hames, and G. R. Taylor eds.): Antibodies, A Laboratory Manual (1988) (Harlow and Lane, eds.): Antibodies A Laboratory Manual, 2nd edition 2013 (E. A. Greenfield ed.); Animal Cell Culture (1987) (R.I. Freshney, ed.); Benjamin Lewin, Genes IX, published by Jones and Bartlet, 2008 (ISBN 0763752223); Kendrew et al. (eds.), The Encyclopedia of Molecular Biology, published by Blackwell Science Ltd., 1994 (ISBN 0632021829); Robert A. Meyers (ed.), Molecular Biology and Biotechnology: a Comprehensive Desk Reference, published by VCH Publishers, Inc., 1995 (ISBN 9780471185710); Singleton et al., Dictionary of Microbiology and Molecular Biology 2nd ed., J. Wiley & Sons (New York, N.Y. 1994), March, Advanced Organic Chemistry Reactions, Mechanisms and Structure 4th ed., John Wiley & Sons (New York, N.Y. 1992); and Marten H. Hofker and Jan van Deursen, Transgenic Mouse Methods and Protocols, 2nd edition (2011).

[0205] As used herein, the singular forms “a”, “an,” and “the” include both singular and plural referents unless the context clearly dictates otherwise.

[0206] The term “optional” or “optionally” means that the subsequent described event, circumstance or substituent may or may not occur, and that the description includes instances where the event or circumstance occurs and instances where it does not.

[0207] The recitation of numerical ranges by endpoints includes all numbers and fractions subsumed within the respective ranges, as well as the recited endpoints.

[0208] The terms “about” or “approximately” as used herein when referring to a measurable value such as a parameter, an amount, a temporal duration, and the like, are meant to encompass variations of and from the specified value, such as variations of +/−10% or less, +/−5% or less, +/−1% or less, +/−0.5% or less, and +/−0.1% or less of and from the specified value, insofar such variations are appropriate to perform in the disclosed invention. It is to be understood that the value to which the modifier “about” or “approximately” refers is itself also specifically, and preferably, disclosed.

[0209] Overview

[0210] The embodiments disclosed herein provide (non-naturally occurring or engineered) constructs, compositions, systems, and methods for site-directed RNA editing of RNA molecules. For example, the present invention provides (non-naturally occurring or engineered) methods for inhibiting intra and inter-cellular signaling pathways by modification of post-translational modification sites on select target RNA molecules. In certain example embodiments, the present invention provides (non-naturally occurring or engineered) methods for inhibiting intracellular phosphorylation of serine, threonine and tyrosine residues by editing the genetic codon of these amino acids by means of site-directed RNA editing or RNA molecules. Embodiments disclosed herein further provide methods of inhibiting pathological activation of cell signaling mediated by post-translational modifications, such as phosphorylation, which are involved in many diseases, including cancer, immunodeficiency, infectious diseases, inflammatory disorders and neurodegenerative disorders. The RNA-editing modification may be aimed at a single post-translational modification site of a single gene, but can also be multiplexed by targeting multiple sites on the same or different genes to increase efficacy. These approaches may be further combined with other treatments such as radiation, chemotherapy, targeted therapy based on antibodies or small molecules, and immunotherapy, which may have a synergistic effect.

[0211] The embodiments disclosed herein provide (non-naturally occurring or engineered) systems, constructs, and methods for targeted base editing. In general, the systems disclosed herein comprise a targeting component and a base editing component. The targeting component may function to specifically target the base editing component to a target nucleotide sequence in which one or more nucleotides are to be edited. The base editing component may then catalyze a chemical reaction to convert a first nucleotide in the target sequence to a second nucleotide. For example, the base editor may catalyze conversion of an adenine such that it is read as guanine by a cell's transcription or translation machinery, or vice versa. Likewise, the base editing component may catalyze conversion of cytidine to an uracil, or vice versa. In certain example embodiments, the base editor may be derived by starting with a known base editor, such as an adenine deaminase or cytidine deaminase, and modified using methods such as directed evolution to derive new functionalities. Directed evolution techniques are known in the art and may include those described in WO 2015/184016 “High-Throughput Assembly of Genetic Permutations.”

[0212] Compositions and Systems

[0213] The present disclosure provides (non-naturally occurring or engineered) systems for editing a nucleic acid such as a gene or a product thereof (e.g., the encoded RNA or protein). In some embodiments, the systems may be an engineered, non-naturally occurring system suitable for modifying post-translational modification sites on proteins encoded by a target nucleic acid sequence. In certain cases, the target nucleic acid sequence is RNA, e.g., mRNA or a fragment thereof. In certain cases, the target nucleic acid sequence is DNA, e.g., a gene or a fragment thereof. In general, the system may comprise one or more of a catalytic inactive (dead) Cas protein (e.g., dead Cas7-11), a nucleotide deaminase protein or catalytic domain thereof, and a guide molecule. In certain examples, the nucleotide deaminase protein may be an adenosine deaminase. In certain examples, the nucleotide deaminase protein may be a cytidine deaminase. The guide sequence may be designed to have a degree of complementarity with a target sequence at one or more codons comprising an adenine or cytidine and that is post-translationally modified.

[0214] CRISPR-Cas

[0215] Some embodiments disclosed herein are directed to CRISPR-Cas (clustered regularly interspaced short palindromic repeats associated proteins) systems. In the conflict between bacterial hosts and their associated viruses, CRISPR-Cas systems provide an adaptive defense mechanism that utilizes programmed immune memory. CRISPR-Cas systems provide their defense through three stages: adaptation, the integration of short nucleic acid sequences into the CRISPR array that serves as memory of past infections; expression, the transcription of the CRISPR array into a pre-crRNA (CRISPR RNA) transcript and processing of the pre-crRNA into functional crRNA species targeting foreign nucleic acids; and interference, the programming of CRISPR effectors by crRNA to cleave nucleic acid of foreign threats. Across all CRISPR-Cas systems, these fundamental stages display enormous variation, including the identity of the target nucleic acid (either RNA, DNA, or both) and the diverse domains and proteins involved in the effector ribonucleoprotein complex of the system.

[0216] CRISPR-Cas systems can be broadly split into two classes based on the architecture of the effector modules involved in pre-crRNA processing and interference. Class 1 systems have multi-subunit effector complexes composed of many proteins, whereas Class 2 systems rely on single-effector proteins with multi-domain capabilities for crRNA binding and interference; Class 2 effectors often provide pre-crRNA processing activity as well. Class 1 systems contain 3 types (type I, III, and IV) and 33 subtypes, including the RNA and DNA targeting type III-systems. Class 2 CRISPR families encompass 3 types (type II, V, and VI) and 17 subtypes of systems, including the RNA-guided DNases Cas9 and Cas12 and the RNA-guided RNase Cas13. Continual sequencing of novel bacterial genomes and metagenomes uncovers new diversity of CRISPR-Cas systems and their evolutionary relationships, necessitating experimental work that reveals the function of these systems and develops them into new tools.

[0217] Among the currently known CRISPR-Cas systems, only the type III and type VI systems have been demonstrated to bind and target RNA, and these two systems have substantially different properties, the most distinguishing being their membership in Class 1 and Class 2, respectively. Characterized subtypes of type III, which span type III-A, B, and C systems, target both RNA and DNA species through an effector complex containing multiple Cas7 (Csm3/5 or Cmr1/4/6) RNA nuclease units in association with a single Cas10 (Csm1 or Cmr2) DNA nuclease. The RNA nuclease activity of Cas7 is mediated through acidic residues in the repeat-associated mysterious proteins (RAMP) domains, which cut at stereotyped intervals in the guide:target duplex. Type III systems also have a target restriction, and cannot efficiently target protospacers in vivo if there is extended homology between the 5′ “tag” of the crRNA and the “anti-tag” 3′ of the protospacer in the target, although this binding does not block RNA cleavage in vitro. In type III systems, pre-crRNA processing is carried out by either host factors or the associated Cas6 family protein, which can physically complex with the effector machinery.

[0218] In contrast to type III systems, type VI systems contain a single CRISPR effector Cas13 that can only effect RNA interference, mediated through basic catalytic residues of dual HEPN domains. This interference requires a protospacer flanking sequence (PFS), although the influence of the PFS varies between orthologs and families. Importantly, the RNA cleavage activity of Cas13, once triggered by crRNA:target duplex formation, is indiscriminate, and activated Cas13 enzymes will cleave other RNA species in vitro, in bacterial hosts, and mammalian cells. This activity, termed the collateral effect, has been applied to CRISPR-based nucleic acid detection technologies. In addition to the RNA interference activity, the Cas13 family members contain pre-crRNA processing activity. Just as single-effector DNA targeting systems have given rise to numerous genome editing applications, Cas13 family members have been applied to a suite of RNA-targeting technologies in both bacterial and eukaryotic cells, including RNA knockdown, RNA editing, RNA tracking, epitranscriptome editing, translational upregulation, epi-transcriptomic reading and writing via N6-Methyladenosine, and isoform modulation.

[0219] The novel type III-E system was recently identified from genomes of 8 bacterial species and is characterized as a fusion of several Cas7 proteins and a putative Cas11 (Csm2)-like small subunit. The domain composition suggests the fusion of multiple type III effector module domains involved in crRNA binding into a single protein effector that is predicted to process pre-crRNA given its homology with Cas5 (Csm4) and conserved aspartates. The lack of other putative effector nucleases in these CRISPR loci raise the additional possibility that this fusion protein is capable of crRNA-directed RNA cleavage. If so, this system would blur the distinction of Class 1 and Class 2 systems, as it would have domains homologous to other Class 1 systems, but possess a single effector module characteristic of Class 2 systems. Beyond the single effector module present in all subtype III-E loci, a majority of type III-E family members contain a putative ancillary gene with a CHAT domain, which is a caspase family protease associated with programmed cell death (PCD), suggesting involvement of PCD-mediated antiviral strategies, as has been observed with type III and VI systems.

[0220] Type III-E system associated effector, interchangeably termed Cas15 and Cas7-11 herein, is a programmable RNase (FIGS. 1A-1D). This system can provide defense against RNA phage and be programmed to target exogenous mRNA species when expressed heterologously in bacteria. Orthologs of Cas7-11 are capable of both processing of pre-crRNA and crRNA-directed cleavage of RNA targets, and determine catalytic residues underlying programmed RNA cleavage. A direct evolutionary path of Cas7-11 can be traced from individual Cas7 and Cas11 effector proteins of subtype III-D1 variant, through an intermediate, a partially fused effector Cas7×3 of the subtype III-D2 variant, to the singe-effector architecture of subtype III-E that is so far unique among the Class 1 CRISPR-Cas systems (FIG. 1D). Cas7-11 most likely originated from two type III-D variants. Three Cas7 domains (domains 3, 4 and 5) are derived from subtype III-D2 that contains a the Cas7×3 effector protein along with Cas10 and another Cas7-like domain fused to a Cas5-like domain. The origin of the N-terminal Cas7 and putative Cas11 domain of Cas7-11 is most likely derived from a III-D1 variant, where both genes are stand-alone.

[0221] Cas7-11 differs substantially from Cas13, in terms of both domain organization and activity (FIG. 1C). Cas13 RNA cleavage is enacted by dual HEPN domains with basic catalytic residues, and this cleavage, once triggered, is indiscriminate. In contrast, Cas7-11 utilizes at least two of four Cas7-like domains with acidic catalytic residues to generate stereotyped cleavage at the target binding site in cis. Furthermore, Cas13 targeting is restricted by the requirement for a PFS, which Cas7-11 does not require, and the DR of Cas7-11-associated crRNA is substantially shorter. Because of these unique features, Cas7-11 may have distinct advantages for RNA targeting and transcriptome engineering biotechnology applications.

[0222] Regulation of interference by accessory proteins has been observed in both type III and type VI systems, and other proteins in the D. ishimotonii type III-E locus can regulate activity of DisCas7-11a. Notably, TPR-CHAT had a strong inhibitory effect on DisCas7-11a phage interference, raising the possibility that unrestricted DisCas7-11a activity could be detrimental for the host. Alternatively, as TPR-CHAT is a caspase family protease associated with programmed cell death (PCD), it is possible that TPR-CHAT is activated by DisCas7-11a and leads to host death, which could mimic death due to phage in these assays. TPR-CHAT caspase activity could be activated by DisCas7-11a and cause PCD through general proteolysis, analogous to PCD triggered by Cas13 collateral activity.

[0223] Similar to Class 2 CRISPR effectors such as Cas9, Cas12, and Cas13, Cas7-11 is highly active in mammalian cells, with substantial knockdown activity on both reporter and endogenous transcripts. Moreover, via inactivation of active sites through mutagenesis, the catalytically inactive dCas7-11 enzyme can be used to recruit ADAR2DD for efficient site-specific A-to-I editing on transcripts. These applications establish Cas7-11 as the basis for an RNA-targeting toolbox that has several benefits compared to Cas13, including the lack of sequence preferences and collateral activity, the latter of which has been shown to induce toxicity in certain cell types. A Cas7-11 toolbox may serve as the basis for multiple RNA technologies, including RNA knockdown, RNA editing, translation modulation, RNA recruitment, RNA tracking, splicing control, RNA stabilization, and potentially even diagnostics.

[0224] AD-Functionalized CRISPR Systems

[0225] In some embodiments, the systems may be AD-functionalized CRISPR system. The term “AD-functionalized CRISPR system” as used here refers to a nucleic acid targeting and editing system comprising (a) a CRISPR-Cas protein, more particularly a Cas7-11 protein which is catalytically active or inactive; (b) a guide molecule which comprises a guide sequence; and (c) an adenosine deaminase (AD) protein or catalytic domain thereof; wherein the adenosine deaminase protein or catalytic domain thereof is covalently or non-covalently linked to the CRISPR-Cas protein or the guide molecule or is adapted to link thereto after delivery; wherein the guide sequence is substantially complementary to the target sequence but comprises a non-pairing C corresponding to the A being targeted for deamination, resulting in an A-C mismatch in an RNA duplex formed by the guide sequence and the target sequence. In some embodiments, the CRISPR-Cas protein and/or the adenosine deaminase comprise one or more heterologous nuclear export signal(s) (NES(s)) or nuclear localization signal(s) (NLS(s)). For application in eukaryotic cells, the CRISPR-Cas protein and/or the adenosine deaminase can be NES-tagged or NLS-tagged.

[0226] One skilled in the art would appreciate that the components (a), (b) and (c) can be delivered to the cell as a ribonucleoprotein complex. The ribonucleoprotein complex can be delivered via one or more lipid nanoparticles. One skilled in the art would appreciate that the components (a), (b) and (c) can be delivered to the cell as one or more RNA molecules, such as one or more guide RNAs and one or more mRNA molecules encoding the CRISPR-Cas protein, the adenosine deaminase protein, and optionally the adaptor protein. The RNA molecules can be delivered via one or more lipid nanoparticles. One skilled in the art would appreciate that the components (a), (b) and (c) can be delivered to the cell as one or more DNA molecules. The one or more DNA molecules can be comprised within one or more vectors such as viral vectors (e.g., AAV). The one or more DNA molecules can comprise one or more regulatory elements operably configured to express the CRISPR-Cas protein, the guide molecule, and the adenosine deaminase protein or catalytic domain thereof, optionally wherein the one or more regulatory elements comprise inducible promoters.

[0227] In some embodiments, the CRISPR-Cas protein is a dead Cas7-11. In some embodiments, the dead Cas7-11 comprises one or more mutations in the Cas7-like domains, including D429A and D654A as well as many other mutations (see table 1).

[0228] In some embodiments, the guide molecule is capable of hybridizing with a target sequence comprising the Adenine to be deaminated within an RNA sequence to form an RNA duplex which comprises a non-pairing Cytosine opposite to said Adenine. Upon RNA duplex formation, the guide molecule forms a complex with the Cas7-11 protein and directs the complex to bind the RNA polynucleotide at the target RNA sequence of interest. Details on the aspect of the guide of the AD-functionalized CRISPR-Cas system are provided herein below.

[0229] In at least a first design, the AD-functionalized CRISPR system comprises: (a) an adenosine deaminase fused or linked to a CRISPR-Cas protein, wherein the CRISPR-Cas protein is catalytically inactive; and (b) a guide molecule comprising a guide sequence designed to introduce an A-C mismatch in an RNA duplex formed between the guide sequence and the target sequence. In some embodiments, the CRISPR-Cas protein and/or the adenosine deaminase can be NLS-tagged, on either the N- or C-terminus or both.

[0230] In at least a second design, the AD-functionalized CRISPR system comprises: (a) a CRISPR-Cas protein that is catalytically inactive; (b) a guide molecule comprising a guide sequence designed to introduce an A-C mismatch in an RNA duplex formed between the guide sequence and the target sequence, and an aptamer sequence (e.g., MS2 RNA motif or PP7 RNA motif) capable of binding to an adaptor protein (e.g., MS2 coating protein or PP7 coat protein); and (c) an adenosine deaminase fused or linked to an adaptor protein, wherein the binding of the aptamer and the adaptor protein recruits the adenosine deaminase to the RNA duplex formed between the guide sequence and the target sequence for targeted deamination at the A of the A-C mismatch. In some embodiments, the adaptor protein and/or the adenosine deaminase can be NLS-tagged, on either the N- or C-terminus or both. The CRISPR-Cas protein can also be NLS-tagged. The CRISPR-Cas protein can also be NLS-tagged.

[0231] The use of different aptamers and corresponding adaptor proteins also allows orthogonal gene editing to be implemented. In one example in which adenosine deaminase are used in combination with cytidine deaminase for orthogonal gene editing/deamination, sgRNA targeting different loci are modified with distinct RNA loops in order to recruit MS2-adenosine deaminase and PP7-cytidine deaminase (or PP7-adenosine deaminase and MS2-cytidine deaminase), respectively, resulting in orthogonal deamination of A or C at the target loci of interested, respectively. PP7 is the RNA-binding coat protein of the bacteriophage Pseudomonas. Like MS2, it binds a specific RNA sequence and secondary structure. The PP7 RNA-recognition motif is distinct from that of MS2. Consequently, PP7 and MS2 can be multiplexed to mediate distinct effects at different genomic loci simultaneously. For example, an sgRNA targeting locus A can be modified with MS2 loops, recruiting MS2-adenosine deaminase, while another sgRNA targeting locus B can be modified with PP7 loops, recruiting PP7-cytidine deaminase. In the same cell, orthogonal, locus-specific modifications are thus realized. This principle can be extended to incorporate other orthogonal RNA-binding proteins.

[0232] In at least a third design, the AD-functionalized CRISPR system comprises: (a) an adenosine deaminase inserted into an internal loop or unstructured region of a CRISPR-Cas protein, wherein the CRISPR-Cas protein is catalytically inactive or a nickase; and (b) a guide molecule comprising a guide sequence designed to introduce an A-C mismatch in an RNA duplex formed between the guide sequence and the target sequence.

[0233] The AD-functionalized CRISPR system described herein can be used to target a specific Adenine within an RNA polynucleotide sequence for deamination. For example, the guide molecule can form a complex with the CRISPR-Cas protein and directs the complex to bind a target RNA sequence in the RNA polynucleotide of interest. Because the guide sequence is designed to have a non-pairing C, the RNA duplex formed between the guide sequence and the target sequence comprises an A-C mismatch, which directs the adenosine deaminase to contact and deaminate the A opposite to the non-pairing C, converting it to an Inosine (I). Since Inosine (I) base pairs with C and functions like G in cellular processes, the targeted deamination of A described herein are useful for correction of undesirable G-A and C-T mutations, as well as for obtaining desirable A-G and T-C mutations.

[0234] In some embodiments, the AD-functionalized CRISPR system is used for targeted deamination in an RNA polynucleotide molecule in vitro. In some embodiments, the AD-functionalized CRISPR system is used for targeted deamination in a DNA molecule and/or RNA molecule within a cell. The cell can be an eukaryotic cell such as a bacteria or cyanobacteria. The cell can be a eukaryotic cell, such as an animal cell, a mammalian cell, a human, or a plant cell.

[0235] The invention also relates to a (non-naturally occurring or engineered) method for treating or preventing a disease by the targeted deamination using the AD-functionalized CRISPR system, wherein the deamination of the A, which remedies a disease caused by transcripts containing a pathogenic G→A or C→T point mutation. Examples of disease that can be treated or prevented with the present invention include cancer, Meier-Gorlin syndrome, Seckel syndrome 4, Joubert syndrome 5, Leber congenital amaurosis 10; Charcot-Marie-Tooth disease, type 2; Charcot-Marie-Tooth disease, type 2; Usher syndrome, type 2C; Spinocerebellar ataxia 28; Spinocerebellar ataxia 28; Spinocerebellar ataxia 28; Long QT syndrome 2; Sjogren-Larsson syndrome; Hereditary fructosuria; Hereditary fructosuria; Neuroblastoma; Neuroblastoma; Kallmann syndrome 1; Kallmann syndrome 1; Kallmann syndrome 1; Metachromatic leukodystrophy.

[0236] AD-functionalized CRISPR system for RNA editing can be used for translation upregulation or downregulation, improving RNA stability and diagnostics. For example, for application in diagnostics, TPR-Chat is an accessory protein that interacts with Cas7-11 interference. Cas7-11 can activate TPR-Chat caspase activity which can then activate a reporter. While this can be used for inducing cell death based on RNA detection (e.g. in cancer cells), it also can be useful for general RNA diagnostics (i.e. molecular diagnostics for bacteria, viruses, and derivatives thereof) in samples. Furthermore, Cas7-11 can re-constitute a split protein like GFP on a specific transcript.

[0237] AD-functionalized CRISPR system for RNA editing can be used to treat or prevent premature termination diseases. Pre-termination diseases are characterized by mutations in early stop codons, either through single nucleotide polymorphisms that introduce termination, indels that change the translational frame of the protein and generate new stop codons, or alternative splicing that preferentially introduces exons that have early termination. By removing stop codons generated in these ways via A to I editing, RNA editing with ADAR could rescue diseases involving premature termination. In cases where SNPs are not G to A, but generate nonsense mutations, clinical benefit could be derived from changing nonsense mutations into missense mutations.

[0238] AD-functionalized CRISPR system for RNA editing can be used to change fertility mutations without germline editing. One advantage of RNA editing over DNA editing is in cases of SNPs affecting fertility, where correction with genome editing would necessarily result in germline editing, with potential ethical or safety implications. RNA editing could correct these mutations without permanent effects on the genome, thereby circumventing these issues.

[0239] AD-functionalized CRISPR system for RNA editing can be used for splicing alteration. Pre-mRNA requires specific splice donor and acceptor sequences in order to undergo processing by the spliceosome. Splice acceptor sites contain an invariant AG sequence that is necessary for acceptance of the attack by the splice donor sequence and intron removal. By targeting Cas7-11-ADAR fusions to pre-mRNA and editing AG splice acceptor sites to IG, it can be possible to inactivate the splice acceptor site, resulting in skipping of the downstream exon. This approach to splicing alteration has advantages over the current method of exon skipping with chemically modified anti-sense oligos. Cas7-11-ADAR can be genetically encoded, allowing for long-term exon skipping. Additionally, Cas7-11-ADAR creates a mutation to promote skipping, which can be more robust than masking of the splice donor/acceptor site by a double stranded RNA, as is done with anti-sense oligos.

[0240] AD-functionalized CRISPR system for RNA editing can be used to alter neoantigens. Neoantigens in cancer are novel antigens that are expressed in tumor cells due to mutations that arise because of defective mismatch repair. Engineering T cells against neoantigens is advantageous because the T cells will have no off-target activity and thus toxicity since the antigens are only expressed in the tumor cells. With RNA base editors, the Cas7-11-ADAR fusions can be targeted to cancer cells to introduce mutations in transcripts that would introduce amino acid changes and new antigens that can be targeted using chimeric antigen receptor T cells. This approach is better than DNA base editors because it is transient and thus the risk of editing non-tumor cells permanently due to off-target delivery is minimal.

[0241] AD-functionalized CRISPR system for RNA editing can be used to change microRNA targets for tumor suppressors. ADAR naturally edits mRNA to generate or remove microRNA targets, thereby modulating expression. Programmable RNA editing can be used to up- or down-regulate microRNA targets via altering of targeting regions. Additionally, microRNAs themselves are natural substrates for ADAR, and programmable RNA editing of micoRNAs can reduce or enhance the function on their corresponding targets.

[0242] AD-functionalized CRISPR system for RNA editing can be used to make multiple edits along a region. The Cas7-11-ADAR fusions can be precisely targeted to edit specific adenosines by introducing a mismatch in the guide region across from the desired adenosine target and creating a bubble that is favorable for A-to-I editing. By introducing multiple of these mismatches across different adenosine sites in the guide/target duplex, it can be possible to introduce multiple mutations at once.

[0243] AD-functionalized CRISPR system for RNA editing can be used for the reversal of TAA (double A to G) for PTC. Many diseases that involve pretermination codon changes involve a TAA stop codon, which would require A-to-I changes to correct rather than the TAG or TGA stop codons which only need one A-to-I edit. Two approaches can be used to reverse the TAA stop codon. (1) As described in the previous section, two mismatches can be introduced in the guide against the two adenosines in the TAA codon. (2) A two-guide array can be used to convert each of the adenosines to inosine sequentially. The first guide in the array can contain a mutation against the first adenosine and the second guide can then have complementarity to this change and have a mismatch against the second adenosine in the stop codon.

[0244] AD-functionalized CRISPR system for RNA editing can be used to treat or prevent cancer (GOF, LOF mutation reversal). Many oncogenic changes in cancer involve G to A mutations that introduce gain of function or loss of function phenotypes to the mutated proteins. The RNA base editors are well positioned to correct these changes and reduce oncogenesis.

[0245] RNA editing with ADAR can be used for the design of new base preferences. Current ADAR1/2 proteins have been found to have surrounding base preferences for catalytic activity, which may pose constraints for certain applications. Rational mutagenesis or directed evolution of ADAR variants with altered or relaxed base preferences can increase the versatility of programmable RNA editing.

[0246] AD-functionalized CRISPR system for RNA editing can comprise ADAR mutants with increased activity in human cells. Although ADAR mutants with altered activity in vitro or in yeast have been previously reported, screening or rational design of mutants with increased activity in the context of human cells can improve the efficiency or specificity of ADAR-based programmable RNA editing constructs.

[0247] AD-functionalized CRISPR system for RNA editing can be used in biological applications of inosine generation. The RNA editing with ADAR generates inosine, which, when occurring multiple times in a transcript, can interact with endogenous biological pathways to increase inflammation in cells and tissues. Generation of multiple inosine bases can increase inflammation, especially in cells where inflammation can lead to clearance. Additional inosine generation could also be used to destabilize transcripts.

[0248] AD-functionalized CRISPR system for RNA editing can be used in removing upstream start codons to promote protein expression of downstream ORF (ATG mutation). Anti-sense oligos have been used for blocking upstream start codon sites to promote protein expression at downstream start codons. This allows the boosting of endogenous protein levels for therapeutic purposes. Cas7-11-ADAR fusions could accomplish a similar effect by converting ATG sites to ITG (GTG) sites and thus remove upstream codons in endogenous transcripts and thus boost protein translation. So far, most therapeutic applications discussed have been for correcting G to A mutations or removing pre-termination sites. This would be an application that allows for boosting gene expression. A good example is boosting fetal hemoglobin levels in sickle cell disease and thalassemias.

[0249] AD-functionalized CRISPR system for RNA editing can comprise the mutagenesis of ADAR for C to U or any transition. It is possible through rational mutagenesis or directed evolution that the ADARs listed in the ortholog section could be made into C to U editors or editors of any base transition.

[0250] FIGS. 23-26 illustrates codon changes and their effects when RNA editors are used. FIG. 23A shows that modulation can be used for modifying protein function through amino acid changes that affect enzyme domains, such as kinases. FIG. 23B shows that modulation can be used for correction of Mendelian disease mutations. FIG. 23C shows the splicing modulation of transcripts by modifying the splice acceptor site. FIGS. 24A-B show potential codon transitions enabled by A>I editing. FIG. 25 shows show potential codon transitions and function enabled by C>U editing. Adapted and modified based on J. D. Watson, Molecular biology of the gene. (Pearson, Boston, ed. Seventh edition, 2014), pp. xxxiv, 872 pages (38). FIG. 66C). FIG. 26A shows that C-U modulation can be used for correction of Mendelian disease mutations. FIG. 26B shows the multiplexed creation of disease-protective alleles that requires C to U RNA editing. FIG. 26C shows the modulation of catalytic activity that requires C to U RNA editing. FIG. 26D shows alter post-translational modifications that requires C to U RNA editing.

[0251] In particular embodiments, the compositions described herein can be used in therapy. This implies that the methods can be performed in vivo, ex vivo or in vitro. In particular embodiments, the methods can be not methods of treatment of the animal or human body or a method for modifying the germ line genetic identity of a human cell. In particular embodiments, when carrying out the method, the target RNA can be not comprised within a human or animal cell. In particular embodiments, when the target is a human or animal target, the method can be carried out ex vivo or in vitro.

[0252] CRISPR-Cas Proteins and Guides

[0253] In some embodiments, the system comprises one or more components of a CRISPR-Cas system. For example, the system may comprise a Cas protein, a guide molecule, or a combination thereof.

[0254] In the methods and systems of the present invention use is made of a CRISPR-Cas protein and corresponding guide molecule. More particularly, the CRISPR-Cas protein is a class 2 CRISPR-Cas protein. In certain embodiments, said CRISPR-Cas protein is a Cas7-11. The Cas7-11 may be Cas7-11a, Cas7-11b, Cas7-11c, or Cas7-11d. The CRISPR-Cas system does not require the generation of customized proteins to target specific sequences but rather a single Cas protein can be programmed by guide molecule to recognize a specific nucleic acid target, in other words the Cas enzyme protein can be recruited to a specific nucleic acid target locus of interest using said guide molecule.

[0255] CRISPR-Cas Proteins

[0256] In some embodiments, the systems may comprise a CRISPR-Cas protein. In certain examples, the CRISPR-Cas protein may be a catalytically inactive (dead) Cas protein. The catalytically inactive (dead) Cas protein may have impaired (e.g., reduced or no) nuclease activity. In some cases, the dead Cas protein may have nickase activity. In some cases, the dead Cas protein may be dead Cas 15 protein. For example, the dead Cas 15 may be dead Cas7-11a, dead Cas7-11b, dead Cas7-11c, or dead Cas7-11d. In some embodiments, the system may comprise a nucleotide sequence encoding the dead Cas protein.

[0257] In its unmodified form, a CRISPR-Cas protein is a catalytically active protein. This implies that upon formation of a nucleic acid-targeting complex (comprising a guide RNA hybridized to a target sequence) one or both DNA strands in or near (e.g., within 1, 2, 3, 4, 5, 6, 7, 8, 9, 10, 20, 50, or more base pairs from) the target sequence is modified (e.g. cleaved). As used herein the term “sequence(s) associated with a target locus of interest” refers to sequences near the vicinity of the target sequence (e.g. within 1, 2, 3, 4, 5, 6, 7, 8, 9, 10, 20, 50, or more base pairs from the target sequence, wherein the target sequence is comprised within a target locus of interest). The unmodified catalytically active Cas7-11 protein generates a staggered cut, whereby the cut sites are typically within the target sequence. More particularly, the staggered cut is typically 13-23 nucleotides distal to the PAM. In particular embodiments, the cut on the non-target strand is 17 nucleotides downstream of the PAM (i.e. between nucleotide 17 and 18 downstream of the PAM), while the cut on the target strand (i.e. strand hybridizing with the guide sequence) occurs a further 4 nucleotides further from the sequence complementary to the PAM (this is 21 nucleotides upstream of the complement of the PAM on the 3′ strand or between nucleotide 21 and 22 upstream of the complement of the PAM).

[0258] In the methods according to the present invention, the CRISPR-Cas protein is preferably mutated with respect to a corresponding wild-type enzyme such that the mutated CRISPR-Cas protein lacks the ability to cleave one or both DNA strands of a target locus containing a target sequence. In particular embodiments, one or more catalytic domains of the Cas7-11 protein are mutated to produce a mutated Cas protein which cleaves only one DNA strand of a target sequence.

[0259] In particular embodiments, the CRISPR-Cas protein may be mutated with respect to a corresponding wild-type enzyme such that the mutated CRISPR-Cas protein lacks substantially all DNA cleavage activity. In some embodiments, a CRISPR-Cas protein may be considered to substantially lack all DNA and/or RNA cleavage activity when the cleavage activity of the mutated enzyme is about no more than 25%, 10%, 5%, 1%, 0.1%, 0.01%, or less of the nucleic acid cleavage activity of the non-mutated form of the enzyme; an example can be when the nucleic acid cleavage activity of the mutated form is nil or negligible as compared with the non-mutated form.

[0260] In certain embodiments of the methods provided herein the CRISPR-Cas protein is a mutated CRISPR-Cas protein which cleaves only one DNA strand, i.e. a nickase. More particularly, in the context of the present invention, the nickase ensures cleavage within the non-target sequence, i.e. the sequence which is on the opposite DNA strand of the target sequence and which is 3′ of the PAM sequence.

[0261] In some embodiments, a CRISPR-Cas protein is considered to substantially lack all DNA cleavage activity when the DNA cleavage activity of the mutated enzyme is about no more than 25%, 10%, 5%, 1%, 0.1%, 0.01%, or less of the DNA cleavage activity of the non-mutated form of the enzyme; an example can be when the DNA cleavage activity of the mutated form is nil or negligible as compared with the non-mutated form. In these embodiments, the CRISPR-Cas protein is used as a generic DNA binding protein. The mutations may be artificially introduced mutations or gain- or loss-of-function mutations.

[0262] In addition to the mutations described above, the CRISPR-Cas protein may be additionally modified. As used herein, the term “modified” with regard to a CRISPR-Cas protein generally refers to a CRISPR-Cas protein having one or more modifications or mutations (including point mutations, truncations, insertions, deletions, chimeras, fusion proteins, etc.) compared to the wild type Cas protein from which it is derived. By derived is meant that the derived enzyme is largely based, in the sense of having a high degree of sequence homology with, a wildtype enzyme, but that it has been mutated (modified) in some way as known in the art or as described herein. The modification can be fusions of effectors like fluorophore, proteins involved in translation modulation (e.g. eIF4E, eIF4A, and eIF4G) and proteins involved with epitranscriptomic modulation (e.g. pseudouridine synthase and m6a writer/readers), and splicing factors involved with changing splicing. Cas7-11 could also be used for sensing RNA for diagnostic purposes. In some embodiments, the C-terminus of the Cas7-11 effector can be truncated. For example, at least 20 amino acids, at least 40 amino acids, at least 50 amino acids, at least 60 amino acids, at least 80 amino acids, at least 100 amino acids, at least 120 amino acids, at least 140 amino acids, at least 150 amino acids, at least 160 amino acids, at least 180 amino acids, at least 200 amino acids, at least 220 amino acids, at least 240 amino acids, at least 250 amino acids, at least 260 amino acids, at least 300 amino acids, or at least 350 amino acids may be truncated at the C-terminus of the Cas 13 effector. For example, up to 120 amino acids, up to 140 amino acids, up to 160 amino acids, up to 180 amino acids, up to 200 amino acids, up to 250 amino acids, up to 300 amino acids, up to 350 amino acids, or up to 400 amino acids may be truncated at the C-terminus of the Cas 15 effector.

[0263] In some embodiments, the N-terminus of the Cas7-11 effector protein may be truncated. For example, at least 20 amino acids, at least 40 amino acids, at least 50 amino acids, at least 60 amino acids, at least 80 amino acids, at least 100 amino acids, at least 120 amino acids, at least 140 amino acids, at least 150 amino acids, at least 160 amino acids, at least 180 amino acids, at least 200 amino acids, at least 220 amino acids, at least 240 amino acids, at least 250 amino acids, at least 260 amino acids, at least 300 amino acids, or at least 350 amino acids may be truncated at the N-terminus of the Cas7-11 effector. For examples, up to 120 amino acids, up to 140 amino acids, up to 160 amino acids, up to 180 amino acids, up to 200 amino acids, up to 250 amino acids, up to 300 amino acids, up to 350 amino acids, up to 400 amino acids may be truncated at the N-terminus of the Cas7-11 effector.

[0264] In some embodiments, both the N− and the C− termini of the Cas7-11 effector protein may be truncated. For example, at least 20 amino acids may be truncated at the C-terminus of the Cas7-11 effector, and at least 20 amino acids, at least 40 amino acids, at least 60 amino acids, at least 80 amino acids, at least 100 amino acids, at least 120 amino acids, at least 140 amino acids, at least 160 amino acids, at least 180 amino acids, at least 200 amino acids, at least 220 amino acids, at least 240 amino acids, at least 260 amino acids, at least 300 amino acids, or at least 350 amino acids may be truncated at the N-terminus of the Cas7-11 effector. For example, at least 40 amino acids may be truncated at the C-terminus of the Cas7-11 effector, and at least 20 amino acids, at least 40 amino acids, at least 60 amino acids, at least 80 amino acids, at least 100 amino acids, at least 120 amino acids, at least 140 amino acids, at least 160 amino acids, at least 180 amino acids, at least 200 amino acids, at least 220 amino acids, at least 240 amino acids, at least 260 amino acids, at least 300 amino acids, or at least 350 amino acids may be truncated at the N-terminus of the Cas7-11 effector. For example, at least 60 amino acids may be truncated at the C-terminus of the Cas7-11 effector, and at least 20 amino acids, at least 40 amino acids, at least 60 amino acids, at least 80 amino acids, at least 100 amino acids, at least 120 amino acids, at least 140 amino acids, at least 160 amino acids, at least 180 amino acids, at least 200 amino acids, at least 220 amino acids, at least 240 amino acids, at least 260 amino acids, at least 300 amino acids, or at least 350 amino acids may be truncated at the N-terminus of the Cas7-11 effector. For example, at least 80 amino acids may be truncated at the C-terminus of the Cas7-11 effector, and at least 20 amino acids, at least 40 amino acids, at least 60 amino acids, at least 80 amino acids, at least 100 amino acids, at least 120 amino acids, at least 140 amino acids, at least 160 amino acids, at least 180 amino acids, at least 200 amino acids, at least 220 amino acids, at least 240 amino acids, at least 260 amino acids, at least 300 amino acids, or at least 350 amino acids may be truncated at the N-terminus of the Cas7-11 effector. For example, at least 100 amino acids may be truncated at the C-terminus of the Cas7-11 effector, and at least 20 amino acids, at least 40 amino acids, at least 60 amino acids, at least 80 amino acids, at least 100 amino acids, at least 120 amino acids, at least 140 amino acids, at least 160 amino acids, at least 180 amino acids, at least 200 amino acids, at least 220 amino acids, at least 240 amino acids, at least 260 amino acids, at least 300 amino acids, or at least 350 amino acids may be truncated at the N-terminus of the Cas7-11 effector. For example, at least 120 amino acids may be truncated at the C-terminus of the Cas7-11 effector, and at least 20 amino acids, at least 40 amino acids, at least 60 amino acids, at least 80 amino acids, at least 100 amino acids, at least 120 amino acids, at least 140 amino acids, at least 160 amino acids, at least 180 amino acids, at least 200 amino acids, at least 220 amino acids, at least 240 amino acids, at least 260 amino acids, at least 300 amino acids, or at least 350 amino acids may be truncated at the N-terminus of the Cas7-11 effector. For example, at least 140 amino acids may be truncated at the C-terminus of the Cas7-11 effector, and at least 20 amino acids, at least 40 amino acids, at least 60 amino acids, at least 80 amino acids, at least 100 amino acids, at least 120 amino acids, at least 140 amino acids, at least 160 amino acids, at least 180 amino acids, at least 200 amino acids, at least 220 amino acids, at least 240 amino acids, at least 260 amino acids, at least 300 amino acids, or at least 350 amino acids may be truncated at the N-terminus of the Cas7-11 effector. For example, at least 160 amino acids may be truncated at the C-terminus of the Cas7-11 effector, and at least 20 amino acids, at least 40 amino acids, at least 60 amino acids, at least 80 amino acids, at least 100 amino acids, at least 120 amino acids, at least 140 amino acids, at least 160 amino acids, at least 180 amino acids, at least 200 amino acids, at least 220 amino acids, at least 240 amino acids, at least 260 amino acids, at least 300 amino acids, or at least 350 amino acids may be truncated at the N-terminus of the Cas7-11 effector. For example, at least 180 amino acids may be truncated at the C-terminus of the Cas7-11 effector, and at least 20 amino acids, at least 40 amino acids, at least 60 amino acids, at least 80 amino acids, at least 100 amino acids, at least 120 amino acids, at least 140 amino acids, at least 160 amino acids, at least 180 amino acids, at least 200 amino acids, at least 220 amino acids, at least 240 amino acids, at least 260 amino acids, at least 300 amino acids, or at least 350 amino acids may be truncated at the N-terminus of the Cas7-11 effector. For example, at least 200 amino acids may be truncated at the C-terminus of the Cas7-11 effector, and at least 20 amino acids, at least 40 amino acids, at least 60 amino acids, at least 80 amino acids, at least 100 amino acids, at least 120 amino acids, at least 140 amino acids, at least 160 amino acids, at least 180 amino acids, at least 200 amino acids, at least 220 amino acids, at least 240 amino acids, at least 260 amino acids, at least 300 amino acids, or at least 350 amino acids may be truncated at the N-terminus of the Cas7-11 effector. For example, at least 220 amino acids may be truncated at the C-terminus of the Cas7-11 effector, and at least 20 amino acids, at least 40 amino acids, at least 60 amino acids, at least 80 amino acids, at least 100 amino acids, at least 120 amino acids, at least 140 amino acids, at least 160 amino acids, at least 180 amino acids, at least 200 amino acids, at least 220 amino acids, at least 240 amino acids, at least 260 amino acids, at least 300 amino acids, or at least 350 amino acids may be truncated at the N-terminus of the Cas7-11 effector. For example, at least 240 amino acids may be truncated at the C-terminus of the Cas7-11 effector, and at least 20 amino acids, at least 40 amino acids, at least 60 amino acids, at least 80 amino acids, at least 100 amino acids, at least 120 amino acids, at least 140 amino acids, at least 160 amino acids, at least 180 amino acids, at least 200 amino acids, at least 220 amino acids, at least 240 amino acids, at least 260 amino acids, at least 300 amino acids, or at least 350 amino acids may be truncated at the N-terminus of the Cas7-11 effector. For example, at least 260 amino acids may be truncated at the C-terminus of the Cas7-11 effector, and at least 20 amino acids, at least 40 amino acids, at least 60 amino acids, at least 80 amino acids, at least 100 amino acids, at least 120 amino acids, at least 140 amino acids, at least 160 amino acids, at least 180 amino acids, at least 200 amino acids, at least 220 amino acids, at least 240 amino acids, at least 260 amino acids, at least 300 amino acids, or at least 350 amino acids may be truncated at the N-terminus of the Cas7-11 effector. For example, at least 280 amino acids may be truncated at the C-terminus of the Cas7-11 effector, and at least 20 amino acids, at least 40 amino acids, at least 60 amino acids, at least 80 amino acids, at least 100 amino acids, at least 120 amino acids, at least 140 amino acids, at least 160 amino acids, at least 180 amino acids, at least 200 amino acids, at least 220 amino acids, at least 240 amino acids, at least 260 amino acids, at least 300 amino acids, or at least 350 amino acids may be truncated at the N-terminus of the Cas7-11 effector. For example, at least 300 amino acids may be truncated at the C-terminus of the Cas7-11 effector, and at least 20 amino acids, at least 40 amino acids, at least 60 amino acids, at least 80 amino acids, at least 100 amino acids, at least 120 amino acids, at least 140 amino acids, at least 160 amino acids, at least 180 amino acids, at least 200 amino acids, at least 220 amino acids, at least 240 amino acids, at least 260 amino acids, at least 300 amino acids, or at least 350 amino acids may be truncated at the N-terminus of the Cas7-11 effector. For example, at least 350 amino acids may be truncated at the C-terminus of the Cas7-11 effector, and at least 20 amino acids, at least 40 amino acids, at least 60 amino acids, at least 80 amino acids, at least 100 amino acids, at least 120 amino acids, at least 140 amino acids, at least 160 amino acids, at least 180 amino acids, at least 200 amino acids, at least 220 amino acids, at least 240 amino acids, at least 260 amino acids, at least 300 amino acids, or at least 350 amino acids may be truncated at the N-terminus of the Cas7-11 effector. For example, at least 20 amino acids may be truncated at the N-terminus of the Cas7-11 effector, and at least 20 amino acids, at least 40 amino acids, at least 60 amino acids, at least 80 amino acids, at least 100 amino acids, at least 120 amino acids, at least 140 amino acids, at least 160 amino acids, at least 180 amino acids, at least 200 amino acids, at least 220 amino acids, at least 240 amino acids, at least 260 amino acids, at least 300 amino acids, or at least 350 amino acids may be truncated at the C-terminus of the Cas7-11 effector. For example, at least 40 amino acids may be truncated at the N-terminus of the Cas7-11 effector, and at least 20 amino acids, at least 40 amino acids, at least 60 amino acids, at least 80 amino acids, at least 100 amino acids, at least 120 amino acids, at least 140 amino acids, at least 160 amino acids, at least 180 amino acids, at least 200 amino acids, at least 220 amino acids, at least 240 amino acids, at least 260 amino acids, at least 300 amino acids, or at least 350 amino acids may be truncated at the C-terminus of the Cas7-11 effector. For example, at least 60 amino acids may be truncated at the N-terminus of the Cas7-11 effector, and at least 20 amino acids, at least 40 amino acids, at least 60 amino acids, at least 80 amino acids, at least 100 amino acids, at least 120 amino acids, at least 140 amino acids, at least 160 amino acids, at least 180 amino acids, at least 200 amino acids, at least 220 amino acids, at least 240 amino acids, at least 260 amino acids, at least 300 amino acids, or at least 350 amino acids may be truncated at the C-terminus of the Cas7-11 effector. For example, at least 80 amino acids may be truncated at the N-terminus of the Cas7-11 effector, and at least 20 amino acids, at least 40 amino acids, at least 60 amino acids, at least 80 amino acids, at least 100 amino acids, at least 120 amino acids, at least 140 amino acids, at least 160 amino acids, at least 180 amino acids, at least 200 amino acids, at least 220 amino acids, at least 240 amino acids, at least 260 amino acids, at least 300 amino acids, or at least 350 amino acids may be truncated at the C-terminus of the Cas7-11 effector. For example, at least 100 amino acids may be truncated at the N-terminus of the Cas7-11 effector, and at least 20 amino acids, at least 40 amino acids, at least 60 amino acids, at least 80 amino acids, at least 100 amino acids, at least 120 amino acids, at least 140 amino acids, at least 160 amino acids, at least 180 amino acids, at least 200 amino acids, at least 220 amino acids, at least 240 amino acids, at least 260 amino acids, at least 300 amino acids, or at least 350 amino acids may be truncated at the C-terminus of the Cas7-11 effector. For example, at least 120 amino acids may be truncated at the N-terminus of the Cas7-11 effector, and at least 20 amino acids, at least 40 amino acids, at least 60 amino acids, at least 80 amino acids, at least 100 amino acids, at least 120 amino acids, at least 140 amino acids, at least 160 amino acids, at least 180 amino acids, at least 200 amino acids, at least 220 amino acids, at least 240 amino acids, at least 260 amino acids, at least 300 amino acids, or at least 350 amino acids may be truncated at the C-terminus of the Cas7-11 effector. For example, at least 140 amino acids may be truncated at the N-terminus of the Cas7-11 effector, and at least 20 amino acids, at least 40 amino acids, at least 60 amino acids, at least 80 amino acids, at least 100 amino acids, at least 120 amino acids, at least 140 amino acids, at least 160 amino acids, at least 180 amino acids, at least 200 amino acids, at least 220 amino acids, at least 240 amino acids, at least 260 amino acids, at least 300 amino acids, or at least 350 amino acids may be truncated at the C-terminus of the Cas7-11 effector. For example, at least 160 amino acids may be truncated at the N-terminus of the Cas7-11 effector, and at least 20 amino acids, at least 40 amino acids, at least 60 amino acids, at least 80 amino acids, at least 100 amino acids, at least 120 amino acids, at least 140 amino acids, at least 160 amino acids, at least 180 amino acids, at least 200 amino acids, at least 220 amino acids, at least 240 amino acids, at least 260 amino acids, at least 300 amino acids, or at least 350 amino acids may be truncated at the C-terminus of the Cas7-11 effector. For example, at least 180 amino acids may be truncated at the N-terminus of the Cas7-11 effector, and at least 20 amino acids, at least 40 amino acids, at least 60 amino acids, at least 80 amino acids, at least 100 amino acids, at least 120 amino acids, at least 140 amino acids, at least 160 amino acids, at least 180 amino acids, at least 200 amino acids, at least 220 amino acids, at least 240 amino acids, at least 260 amino acids, at least 300 amino acids, or at least 350 amino acids may be truncated at the C-terminus of the Cas7-11 effector. For example, at least 200 amino acids may be truncated at the N-terminus of the Cas7-11 effector, and at least 20 amino acids, at least 40 amino acids, at least 60 amino acids, at least 80 amino acids, at least 100 amino acids, at least 120 amino acids, at least 140 amino acids, at least 160 amino acids, at least 180 amino acids, at least 200 amino acids, at least 220 amino acids, at least 240 amino acids, at least 260 amino acids, at least 300 amino acids, or at least 350 amino acids may be truncated at the C-terminus of the Cas7-11 effector. For example, at least 220 amino acids may be truncated at the N-terminus of the Cas7-11 effector, and at least 20 amino acids, at least 40 amino acids, at least 60 amino acids, at least 80 amino acids, at least 100 amino acids, at least 120 amino acids, at least 140 amino acids, at least 160 amino acids, at least 180 amino acids, at least 200 amino acids, at least 220 amino acids, at least 240 amino acids, at least 260 amino acids, at least 300 amino acids, or at least 350 amino acids may be truncated at the C-terminus of the Cas7-11 effector. For example, at least 240 amino acids may be truncated at the N-terminus of the Cas7-11 effector, and at least 20 amino acids, at least 40 amino acids, at least 60 amino acids, at least 80 amino acids, at least 100 amino acids, at least 120 amino acids, at least 140 amino acids, at least 160 amino acids, at least 180 amino acids, at least 200 amino acids, at least 220 amino acids, at least 240 amino acids, at least 260 amino acids, at least 300 amino acids, or at least 350 amino acids may be truncated at the C-terminus of the Cas7-11 effector. For example, at least 260 amino acids may be truncated at the N-terminus of the Cas7-11 effector, and at least 20 amino acids, at least 40 amino acids, at least 60 amino acids, at least 80 amino acids, at least 100 amino acids, at least 120 amino acids, at least 140 amino acids, at least 160 amino acids, at least 180 amino acids, at least 200 amino acids, at least 220 amino acids, at least 240 amino acids, at least 260 amino acids, at least 300 amino acids, or at least 350 amino acids may be truncated at the C-terminus of the Cas7-11 effector. For example, at least 280 amino acids may be truncated at the N-terminus of the Cas7-11 effector, and at least 20 amino acids, at least 40 amino acids, at least 60 amino acids, at least 80 amino acids, at least 100 amino acids, at least 120 amino acids, at least 140 amino acids, at least 160 amino acids, at least 180 amino acids, at least 200 amino acids, at least 220 amino acids, at least 240 amino acids, at least 260 amino acids, at least 300 amino acids, or at least 350 amino acids may be truncated at the C-terminus of the Cas7-11 effector. For example, at least 300 amino acids may be truncated at the N-terminus of the Cas7-11 effector, and at least 20 amino acids, at least 40 amino acids, at least 60 amino acids, at least 80 amino acids, at least 100 amino acids, at least 120 amino acids, at least 140 amino acids, at least 160 amino acids, at least 180 amino acids, at least 200 amino acids, at least 220 amino acids, at least 240 amino acids, at least 260 amino acids, at least 300 amino acids, or at least 350 amino acids may be truncated at the C-terminus of the Cas7-11 effector. For example, at least 350 amino acids may be truncated at the N-terminus of the Cas7-11 effector, and at least 20 amino acids, at least 40 amino acids, at least 60 amino acids, at least 80 amino acids, at least 100 amino acids, at least 120 amino acids, at least 140 amino acids, at least 160 amino acids, at least 180 amino acids, at least 200 amino acids, at least 220 amino acids, at least 240 amino acids, at least 260 amino acids, at least 300 amino acids, or at least 350 amino acids may be truncated at the C-terminus of the Cas7-11 effector.

[0265] The additional modifications of the CRISPR-Cas protein may or may not cause an altered functionality. By means of example, and in particular with reference to CRISPR-Cas protein, modifications which do not result in an altered functionality include for instance codon optimization for expression into a particular host, or providing the nuclease with a particular marker (e.g. for visualization). Modifications with may result in altered functionality may also include mutations, including point mutations, insertions, deletions, truncations (including split nucleases), etc. Fusion proteins may without limitation include for instance fusions with heterologous domains or functional domains (e.g. localization signals, catalytic domains, etc.). In certain embodiments, various modifications may be combined (e.g. a mutated nuclease which is catalytically inactive and which further is fused to a functional domain, such as for instance to induce DNA methylation or another nucleic acid modification, such as including without limitation a break (e.g. by a different nuclease (domain)), a mutation, a deletion, an insertion, a replacement, a ligation, a digestion, a break or a recombination). As used herein, “altered functionality” includes without limitation an altered specificity (e.g. altered target recognition, increased (e.g. “enhanced” Cas proteins) or decreased specificity, or altered PAM recognition), altered activity (e.g. increased or decreased catalytic activity, including catalytically inactive nucleases or nickases), and/or altered stability (e.g. fusions with destabilization domains). Suitable heterologous domains include without limitation a nuclease, a ligase, a repair protein, a methyltransferase, (viral) integrase, a recombinase, a transposase, an argonaute, a cytidine deaminase, a retron, a group II intron, a phosphatase, a phosphorylase, a sulpfurylase, a kinase, a polymerase, an exonuclease, etc. Examples of all these modifications are known in the art. It will be understood that a “modified” nuclease as referred to herein, and in particular a “modified” Cas or “modified” CRISPR-Cas system or complex preferably still has the capacity to interact with or bind to the polynucleic acid (e.g. in complex with the guide molecule). Such modified Cas protein can be combined with the deaminase protein or active domain thereof as described herein.

[0266] In certain embodiments, CRISPR-Cas protein may comprise one or more modifications resulting in enhanced activity and/or specificity, such as including mutating residues that stabilize the targeted or non-targeted strand (e.g. eCas9; “Rationally engineered Cas9 nucleases with improved specificity”, Slaymaker et al. (2016), Science, 351(6268):84-88, incorporated herewith in its entirety by reference). In certain embodiments, the altered or modified activity of the engineered CRISPR protein comprises increased targeting efficiency or decreased off-target binding. In certain embodiments, the altered activity of the engineered CRISPR protein comprises modified cleavage activity. In certain embodiments, the altered activity comprises increased cleavage activity as to the target polynucleotide loci. In certain embodiments, the altered activity comprises decreased cleavage activity as to the target polynucleotide loci. In certain embodiments, the altered activity comprises decreased cleavage activity as to off-target polynucleotide loci. In certain embodiments, the altered or modified activity of the modified nuclease comprises altered helicase kinetics. In certain embodiments, the modified nuclease comprises a modification that alters association of the protein with the nucleic acid molecule comprising RNA (in the case of a Cas protein), or a strand of the target polynucleotide loci, or a strand of off-target polynucleotide loci. In an aspect of the invention, the engineered CRISPR protein comprises a modification that alters formation of the CRISPR complex. In certain embodiments, the altered activity comprises increased cleavage activity as to off-target polynucleotide loci. Accordingly, in certain embodiments, there is increased specificity for target polynucleotide loci as compared to off-target polynucleotide loci. In other embodiments, there is reduced specificity for target polynucleotide loci as compared to off-target polynucleotide loci. In certain embodiments, the mutations result in decreased off-target effects (e.g. cleavage or binding properties, activity, or kinetics), such as in case for Cas proteins for instance resulting in a lower tolerance for mismatches between target and guide RNA. Other mutations may lead to increased off-target effects (e.g. cleavage or binding properties, activity, or kinetics). Other mutations may lead to increased or decreased on-target effects (e.g. cleavage or binding properties, activity, or kinetics). In certain embodiments, the mutations result in altered (e.g. increased or decreased) helicase activity, association or formation of the functional nuclease complex (e.g. CRISPR-Cas complex). In certain embodiments, as described above, the mutations result in an altered PAM recognition, i.e. a different PAM may be (in addition or in the alternative) be recognized, compared to the unmodified Cas protein. Particularly preferred mutations include positively charged residues and/or (evolutionary) conserved residues, such as conserved positively charged residues, in order to enhance specificity. In certain embodiments, such residues may be mutated to uncharged residues, such as alanine.

[0267] Type-III CRISPR-Cas Proteins

[0268] The application describes methods using Type-III CRISPR-Cas proteins. This is exemplified herein with Cas7-11, whereby a number of orthologs or homologs have been identified. It will be apparent to the skilled person that further orthologs or homologs can be identified and that any of the functionalities described herein may be engineered into other orthologs, including chimeric enzymes comprising fragments from multiple orthologs.

[0269] Computational methods of identifying novel CRISPR-Cas loci are described in EP3009511 or US2016208243 and may comprise the following steps: detecting all contigs encoding the Cas1 protein; identifying all predicted protein coding genes within 20 kB of the cas1 gene; comparing the identified genes with Cas protein-specific profiles and predicting CRISPR arrays; selecting unclassified candidate CRISPR-Cas loci containing proteins larger than 500 amino acids (>500 aa); analyzing selected candidates using methods such as PSI-BLAST and HHPred to screen for known protein domains, thereby identifying novel Class 2 CRISPR-Cas loci (see also Schmakov et al. 2015, Mol Cell. 60(3):385-97). In addition to the above-mentioned steps, additional analysis of the candidates may be conducted by searching metagenomics databases for additional homologs. Additionally or alternatively, to expand the search to non-autonomous CRISPR-Cas systems, the same procedure can be performed with the CRISPR array used as the seed.

[0270] In one aspect the detecting all contigs encoding the Cas1 protein is performed by GenemarkS, a gene prediction program as further described in “GeneMarkS: a self-training method for prediction of gene starts in microbial genomes. Implications for finding sequence motifs in regulatory regions.” John Besemer, Alexandre Lomsadze and Mark Borodovsky, Nucleic Acids Research (2001) 29, pp 2607-2618, herein incorporated by reference.

[0271] In one aspect the identifying all predicted protein coding genes is carried out by comparing the identified genes with Cas protein-specific profiles and annotating them according to NCBI Conserved Domain Database (CDD) which is a protein annotation resource that consists of a collection of well-annotated multiple sequence alignment models for ancient domains and full-length proteins. These are available as position-specific score matrices (PSSMs) for fast identification of conserved domains in protein sequences via RPS-BLAST. CDD content includes NCBI-curated domains, which use 3D-structure information to explicitly define domain boundaries and provide insights into sequence/structure/function relationships, as well as domain models imported from a number of external source databases (Pfam, SMART, COG, PRK, TIGRFAM). In a further aspect, CRISPR arrays were predicted using a PILER-CR program which is a public domain software for finding CRISPR repeats as described in “PILER-CR: fast and accurate identification of CRISPR repeats,” Edgar, R. C., BMC Bioinformatics, Jan 20; 8:18(2007), herein incorporated by reference.

[0272] In a further aspect, the case by case analysis is performed using PSI-BLAST (Position-Specific Iterative Basic Local Alignment Search Tool). PSI-BLAST derives a position-specific scoring matrix (PSSM) or profile from the multiple sequence alignment of sequences detected above a given score threshold using protein-protein BLAST. This PSSM is used to further search the database for new matches, and is updated for subsequent iterations with these newly detected sequences. Thus, PSI-BLAST provides a means of detecting distant relationships between proteins.

[0273] In another aspect, the case by case analysis is performed using HHpred, a method for sequence database searching and structure prediction that is as easy to use as BLAST or PSI-BLAST and that is at the same time much more sensitive in finding remote homologs. In fact, HHpred's sensitivity is competitive with the most powerful servers for structure prediction currently available. HHpred is the first server that is based on the pairwise comparison of profile hidden Markov models (HMMs). Whereas most conventional sequence search methods search sequence databases such as UniProt or the NR, HHpred searches alignment databases, like Pfam or SMART. This greatly simplifies the list of hits to a number of sequence families instead of a clutter of single sequences. All major publicly available profile and alignment databases are available through HHpred. HHpred accepts a single query sequence or a multiple alignment as input. Within only a few minutes it returns the search results in an easy-to-read format similar to that of PSI-BLAST. Search options include local or global alignment and scoring secondary structure similarity. HHpred can produce pairwise query-template sequence alignments, merged query-template multiple alignments (e.g. for transitive searches), as well as 3D structural models calculated by the MODELLER software from HHpred alignments.

[0274] Deactivated/Inactivated Cas7-11 Proteins

[0275] Where the Cas7-11 protein has nuclease activity, the Cas7-11 protein may be modified to have diminished nuclease activity e.g., nuclease inactivation of at least 70%, at least 80%, at least 90%, at least 95%, at least 97%, or 100% as compared with the wild type enzyme; or to put in another way, a Cas7-11 enzyme having advantageously about 0% of the nuclease activity of the non-mutated or wild type Cas7-11 enzyme or CRISPR-Cas protein, or no more than about 3% or about 5% or about 10% of the nuclease activity of the non-mutated or wild type Cas7-11 enzyme.

[0276] Modified Cas7-11 Enzymes

[0277] In particular embodiments, it is of interest to make use of an engineered Cas7-11 protein as defined herein, such as Cas7-11, wherein the protein complexes with a nucleic acid molecule comprising RNA to form a CRISPR complex, wherein when in the CRISPR complex, the nucleic acid molecule targets one or more target polynucleotide loci, the protein comprises at least one modification compared to unmodified Cas7-11 protein, and wherein the CRISPR complex comprising the modified protein has altered activity as compared to the complex comprising the unmodified Cas7-11 protein. It is to be understood that when referring herein to CRISPR “protein,” the Cas7-11 protein is an unmodified or modified CRISPR-Cas protein (e.g. having increased or decreased or the same (or no) enzymatic activity, such as without limitation including Cas7-11. The term “CRISPR protein” may be used interchangeably with “CRISPR-Cas protein”, irrespective of whether the CRISPR protein has altered, such as increased or decreased (or no) enzymatic activity, compared to the wild type CRISPR protein.

[0278] Computational analysis of the primary structure of Cas7-11 nucleases reveals 5 distinct domain regions.

[0279] Based on the above information, mutants can be generated which lead to inactivation of the enzyme or which modify the double strand nuclease to nickase activity. In alternative embodiments, this information is used to develop enzymes with reduced off-target effects.

[0280] In certain of the above-described Cas7-11 enzymes, the enzyme is modified by mutation of one or more residues (in the Cas7-like domains as well as the small subunit) including but not limited to positions listed in table 1.

[0281] Orthologs of Cas7-11

[0282] The terms “orthologue” (also referred to as “ortholog” herein) and “homologue” (also referred to as “homolog” herein) are well known in the art. By means of further guidance, a “homologue” of a protein as used herein is a protein of the same species which performs the same or a similar function as the protein it is a homologue of. Homologous proteins may but need not be structurally related, or are only partially structurally related. An “orthologue” of a protein as used herein is a protein of a different species which performs the same or a similar function as the protein it is an orthologue of. Orthologous proteins may but need not be structurally related, or are only partially structurally related. Homologs and orthologs may be identified by homology modelling (see, e.g., Greer, Science vol. 228 (1985) 1055, and Blundell et al. Eur J Biochem vol 172 (1988), 513) or “structural BLAST” (Dey F, Cliff Zhang Q, Petrey D, Honig B. Toward a “structural BLAST”: using structural relationships to infer function. Protein Sci. 2013 April; 22(4):359-66. doi: 10.1002/pro.2225.). See also Shmakov et al. (2015) for application in the field of CRISPR-Cas loci. Homologous proteins may but need not be structurally related, or are only partially structurally related.

[0283] The present invention encompasses the use of a Cas7-11 effector protein, derived from a Cas7-11 locus denoted as subtype III-E. Herein such effector proteins are also referred to as “Cas7-11p”, e.g., a Cas7-11 protein (and such effector protein or Cas7-11 protein or protein derived from a Cas7-11 locus is also called “CRISPR-Cas protein”).

[0284] In particular embodiments, the effector protein is a Cas7-11 effector protein from an organism from a genus comprising Candidatus Jettenia caeni, Candidatus Scalindua brodae, Desulfobacteraceae, Candidatus Magnetomorum, Desulfonema Ishimotonii, Candidatus Brocadia, Deltaproteobacteria, Syntrophorhabdaceae, or Nitrospirae.

[0285] Example Cas Proteins

[0286] In certain example embodiments, the CRISPR effector protein is a Cas7-11 type III-D/III-E ortholog selected from Table 1 and FIG. 27A-27C.

TABLE 1
SEQ ID NO
& Protein

| ID/Contig | Sequence |
|---|---|
| SEQ ID NO: 1 | MHTILPIHLTFLEPYRLAEWHAKADRKKNKRYLRGMSFAQWHKDKDGIGKPYITGTL |
| WP_007220849 | LRSAVLNAAEELISLNQGMWAKEPCCNGKFETEKDKPAVLRKRPTIQWKTGRPAICD |
| | PEKQEKKDACPLCMLLGRFDKAGKRHRDNKYDKHDYDIHFDNLNLITDKKFSHPDDI |
| | ASERILNRVDYTTGKAHDYFKVWEVDDDQWWQFTGTITMHDDCSKAKGLLLASLCF |
| | VDKLCGALCRIEVTGNNSQDENKEYAHPDTGIITSLNLKYQNNSTIHQDAVPLSGSAH |
| | DNDEPPVHDNDSSLDNDTITLLSMKAKEIVGAFRESGKIEKARTLADVIRAMRLQKPD |
| | IWEKLPKGINDKHHLWDREVNGKKLRNILEELWRLMNKRNAWRTFCEVLGNELYRC |
| | YKEKTGGIVLRFRTLGETEYYPEPEKTEPCLISDNSIPITPLGGVKEWIIIGRLKAETPFY |
| | FGVQSSFDSTQDDLDLVPDIVNTDEKLEANEQTSFRILMDKKGRYRIPRSLIRGVLRRD |
| | LRTAFGGSGCIVELGRMIPCDCKVCAIMRKITVMDSRSENIELPDIRYRIRLNPYTATV |
| | DEGALFDMEIGPEGITFPFVFRYRGEDALPRELWSVIRYWMDGMAWLGGSGSTGKG |
| | RFALIDIKVFEWDLCNEEGLKAYICSRGLRGIEKEVLLENKTIAEITNLFKTEEVKFFES |
| | YSKHIKQLCHECIINQISFLWGLRSYYEYLGPLWTEVKYEIKIASPLLSSDTISALLNKD |
| | NIDCIAYEKRKWENGGIKFVPTIKGETIRGIVRMAVGKRSGDLGMDDHEDCSCTLCTI |
| | FGNEHEAGKLRFEDLEVVEEKLPSEQNSDSNKIPFGPVQDGDGNREKECVTAVKSYK |
| | KKLIDHVAIDRFHGGAEDKMKFNTLPLAGSFEKPIILKGRFWIKKDIVKDYKKKIEDA |
| | MVDIRDGLYPIGGKTGIGYGWVTDLTILNPQSGFQIPVKKDISPEPGTYSTYPSHSTPSL |
| | NKGHIYYPHYFLAPANTVHREQEMIGHEQFHKEQKGELLVSGKIVCTLKTVTPLIIPDT |
| | ENEDAFGLQNTYSGHKNYQFFHINDEIMVPGSEIRGMISSVYEAITNSCFRVYDETKYI |
| | TRRLSPEKKDESNDKNKSQDDASQKIRKGLVKKTDEGFSIIEVERYSMKTKGGTKLV |
| | DKVYRLPLYDSEAVIASIQFEQYGEKNEKRNAKIRAAIKRNEVIAEVARKNLIFLRSLT |
| | PEELKKVLQGEILVKFSLKSGKNPNDYLAELHENGTERGLIKFTGLNMVNIKNVNEED |
| | KDFNDTWDWEKLNIFHNAHEKRNSLKQGYPRPVLKFIKDRVEYTIPKRCERIFCIPVK |
| | NTIEYKVSSKVCKQYKDVLSDYEKNFGHINKIFTTKIQKRELTDGDLVYFIPNEGADK |
| | TVQAIMPVPLSRITDSRTLGERLPHKNLLPCVHEVNEGLLSGILDSLDKKLLSIHPEGLC |
| | PTCRLFGTTYYKGRVRFGFANLMNKPKWLTERENGCGGYVTLPLLERPRLTWSVPSD |
| | KCDVPGRKFYIHHNGWQEVLRNNDITPKTENNRTVEPLAADNRFTFDVYFENLREWE |
| | LGLLCYCLELEPGMGHKLGMGKPMGFGSVKIAIERLQTFTVHQDGINWKPSENEIGV |
| | YVQKGREKLVEWFTPSAPHKNMEWNGVKHIKDLRSLLSIPGDKPTVKYPTLNKDAE |
| | GAISDYTYERLSDTKLLPHDKRVEYLRTPWSPWNAFVKEAEYSPSEKSDEKGRETIRT |
| | KPKSLPSVKSIGKVKWFDEGKGFGILIMDDGKEVSISKNSIRGNILLKKGQKVTFHIVQ |
| | GLIPKAEDIEIAK |
| SEQ ID NO: 2 | MNITVELTFFEPYRLVEWFDWDARKKSHSAMRGQAFAQWTWKGKGRTAGKSFITGT |
| KHE91659 | LVRSAVIKAVEELLSLNNGKWEGVPCCNGSFQTDESKGKKPSFLRKRHTLQWQANN |
| | KNICDKEEACPFCILLGRFDNAGKVHERNKDYDIHFSNFDLDHKQEKNDLRLVDIASG |
| | RILNRVDFDTGKAKDYFRTWEADYETYGTYTGRITLRNEHAKKLLLASLGFVDKLCG |
| | ALCRIEVIKKSESPLPSDTKEQSYTKDDTVEVLSEDHNDELRKQAEVIVEAFKQNDKL |
| | EKIRILADAIRTLRLHGEGVIEKDELPDGKEERDKGHHLWDIKVQGTALRTKLKELWQ |
| | SNKDIGWRKFTEMLGSNLYLIYKKETGGVSTRFRILGDTEYYSKAHDSEGSDLFIPVTP |
| | PEGIETKEWIIVGRLKAATPFYFGVQQPSDSIPGKEKKSEDSLVINEHTSFNILLDKENR |
| | YRIPRSALRGALRRDLRTAFGSGCNVSLGGQILCNCKVCIEMRRITLKDSVSDFSEPPEI |
| | RYRIAKNPGTATVEDGSLFDIEVGPEGLTFPFVLRYRGHKFPEQLSSVIRYWEENDGK |
| | NGMAWLGGLDSTGKGRFALKDIKIFEWDLNQKINEYIKERGMRGKEKELLEMGESSL |
| | PDGLIPYKFFEERECLFPYKENLKPQWSEVQYTIEVGSPLLTADTISALTEPGNRDAIAY |
| | KKRVYNDGNNAIEPEPRFAVKSETHRGIFRTAVGRRTGDLGKEDHEDCTCDMCIIFGN |
| | EHESSKIRFEDLELINGNEFEKLEKHIDHVAIDRFTGGALDKAKFDTYPLAGSPKKPLK |
| | LKGRFWIKKGFSGDHKLLITTALSDIRDGLYPLGSKGGVGYGWVAGISIDDNVPDDFK |
| | EMINKTEMPLPEEVEESNNGPINNDYVHPGHQSPKQDHKNKNIYYPHYFLDSGSKVY |
| | REKDIITHEEFTEELLSGKINCKLETLTPLIIPDTSDENGLKLQGNKPGHKNYKFFNING |
| | ELMIPGSELRGMLRTHFEALTKSCFAIFGEDSTLSWRMNADEKDYKIDSNSIRKMESQ |
| | RNPKYRIPDELQKELRNSGNGLFNRLYTSERRFWSDVSNKFENSIDYKREILRCAGRP |
| | KNYKGGIIRQRKDSLMAEELKVHRLPLYDNFDIPDSAYKANDHCRKSATCSTSRGCR |
| | ERFTCGIKVRDKNRVFLNAANNNRQYLNNIKKSNHDLYLQYLKGEKKIRFNSKVITG |
| | SERSPIDVIAELNERGRQTGFIKLSGLNNSNKSQGNTGTTFNSGWDRFELNILLDDLET |
| | RPSKSDYPRPRLLFTKDQYEYNITKRCERVFEIDKGNKTGYPVDDQIKKNYEDILDSY |
| | DGIKDQEVAERFDTFTRGSKLKVGDLVYFHIDGDNKIDSLIPVRISRKCASKTLGGKLD |
| | KALHPCTGLSDGLCPGCHLFGTTDYKGRVKFGFAKYENGPEWLITRGNNPERSLTLG |
| | VLESPRPAFSIPDDESEIPGRKFYLHHNGWRIIRQKQLEIRETVQPERNVTTEVMDKGN |
| | VFSFDVRFENLREWELGLLLQSLDPGKNIAHKLGKGKPYGFGSVKIKIDSLHTFKINSN |
| | NDKIKRVPQSDIREYINKGYQKLIEWSGNNSIQKGNVLPQWHVIPHIDKLYKLLWVPF |
| | LNDSKLEPDVRYPVLNEESKGYIEGSDYTYKKLGDKDNLPYKTRVKGLTTPWSPWNP |
| | FQVIAEHEEQEVNVTGSRPSVTDKIERDGKMV |
| SEQ ID NO: 3 | MKITLRFLEPFRMLDWIRPEERISGNKAFQRGLTFARWHKSKADDKGKPFITGTLLRS |
| OQY58162 | AVIRAAEHLLVLSKGKVGEKACCPGKFLTETDTETNKAPTMFLRKRPTLKWTDRKGC |
| | DPDFPCPLCELLGPGAVGKKEGEAGINSYVNFGNLSFPGDTGYSNAREIAVRRVVNRV |
| | DYASGKAHDFFRIFENDHIAFPCFHGEIAFGENVSSQARNLLQDSLRFTDRLCGALCVI |
| | RYDGDIPKCGKTAPLPETESIQNAAEETARAIVRVFHGGRKDPEQAQIDKAEQIQLLSA |
| | AVRELGRDKKKVSALPLNHEGKEDHYLWDKKAGGETIRTILKAAAEKEAVANQWR |
| | QFCIELSEELYKEAKKAHGGLEPARRIMGDAEFSDKSVPDTVSHSIGISVEKETIIMGTL |
| | KAETPFFFGIESKEKKQTDLMLLLDGQNHYRIPRSALRGILRRDIRSVLGTGCNAEVGG |
| | RPCLCPVCRIMKNITVMDTRSSTDTLPEVRPRIRLNPFTGSVQEKALFNMEMGTEGIEF |
| | PFVLSYRGKKTLPKELRNVLNWWTEGKAFLGGAASTGKSIFQLSDIHAFSSDLSDETA |
| | RESYLSNHGWRGIMENSIVHESPLEGGAGGCSFGLSDLPKLGWHAEDLKLSDIEKYKP |
| | FHRQKISVKITLNSPFLNGDPVRALTEDVADIVSFKKYTQGGEKIIYAYKSESFRGVVR |
| | TALGLRNQGNDDITGKKNVPLIALTHQDCECMLCRFFGSEYEAGRLYFEDLTFESEPE |
| | PRRFDHVAIDRFTGGAVNQKKFDDRSLVPGKEGFMTLIGCFWMRKDKELSRNEIEEL |
| | GKAFADIRDGLYPLGAKGSMGYGQVAELSIVDDEDSDDENNPAKLLAESMKNASPSL |
| | GTPTSLKKKDAGLSLRFDENADYYPYYFLEPEKSVHRDPVPPGHEEAFRGGLLTGRIT |
| | CRLTVRTPLIVPNTETDDAFNMKEKAGKKKDAYHKSYRFFTLNRVPMIPGSEIRGMIS |
| | SVFEALSNSCFRIFDEKYRLSWRMDADVKELEQFKPGRVADDGKRIEEMKEIRYPFYD |
| | RTYPERNAQNGYFRWDARISLTDNSMRKMEKDGVPRNVIYKLNTLKNKAYKSEKSF |
| | LFDLKNKAGGVGRYKKLVLKHAEVRGGEIPYYSHPTPTDCKLLSLVGPNRQLCRQDT |
| | LVQYRIIKHRRGAKPEEDFMFVGTPSENQKGHKENNDHGGGYLKISGPNKIEKENVLT |
| | SGVPSVPENMGAVVHNCPPRLVEVTVRCGRKQEEECKRKRLVPEYVCADPEKKVTY |
| | TMTKRCERIFLEKSRRIIPFTNDAVDKFEILVKEYRRNAEQQDTPEAFQTILPENGTVNP |
| | GDLLYFREEKGKAAEIVPVRISRKVDDRHIGKRIDPELRPCHGEWIEDGDLSKLDAYP |
| | AEKKLLTRHPKGLCPACRVFGTGSYKSRVRFGFAALKGTPKWLKEDPAEPSQGKGIT |
| | LPLLERPRPTWAVLHNDKENSEIPGRKFYVHHNGWKGISEGIHPISGENIEPDENNRTV |
| | EVLDKGNRFVFELSFENLEPRELGLLIHSLQLEKGLAHKLGMAKSMGFGSVEIDVESV |
| | RVKHRSGEWDYKDGETVDGWIEEGKRGVAAKGKANDLRKLLYLPGEKQNPHVHYP |
| | TLKKEKKGDPPGYEDLKKSFREKKLNRRKMLTTLWEPWHK |
| SEQ ID NO: 4 | MLKLKVKITYFQPFRVIPWIKEDDRNSDRNYLRGGTFARWHKDKKDDIHGKPYITGT |
| KPA14974 | LLRSALFTEIEKIKIHHSDFIHCCNAIDRTEGKHQPSFLRKRPVYTENKNIQACNKCPLC |
| | LIMGRGDDRGEDLKKKKHYNGKHYQNWTVHFSNFDTQATFYWKDIVQKRILNRVD |
| | QTCGKAKDFFKVCEVDHIACPTLNGIIRINDEKLSQEEISKIKQLIAVGLAQIESLAGGIC |
| | RIDITNQNHDDLIKSFEETKPSKILQPNLKESGEERFELAKLELLAEYLTQSFDANQKEQ |
| | QLRRLADAIRDLRKYSPDYLKDLPKGKKGGRTSIWNKKVADDFTLRDCLKNQKIPNE |
| | LWRQFCEGLGREVYKISKNISNRSDAKPRLLGETEYAGLPLRKEDEKEYSPTYQNQES |
| | LPKTKWIISGELQAITPFYIGHVNKTSHTRSTIFLNMNGQFCIPRSTLRGALRRDLRLVF |
| | GDSCNTPVGSRVCYCQVCQIMRCIKFEDALSDVDSPPEVRHRIRLNCHTGVVEEGALF |
| | DMETGFQGMIFPFRLYYESKNEIMSQHLYEVLNNWTNGQAFFGGEAGTGFGRFKLLN |
| | NEVFLWEIDGEEEDYLQYLFSRGYKGIETDEIKKVADPIKWKTLFTKLEIPPEKIPLTQL |
| | NYTLTIDSPLISRDPIAAMLDNRNPDAVMVKKTILVYEQDSSTHKNVPKEVPKYFIKSE |
| | TIRGLLRSIISRTEIKLEDGKKERIFNLDHEDCDCLQCRLFGNVHQQGILRFEDAEITNK |
| | NVSDCCIDHVAIDRFTGGGVEKMKFNDYPLSASPKNCLNLKGSIWITSALKDSEKEAL |
| | SKALSELKYGYASLGGLSAIGYGRVKELTLEENDIIQLTEITESNLNSQSRLSLKPDVK |
| | KELSNNHFYYPHYFIKPAPKEVVRESRLISHVQGHDTEGEFLLTGKIKCRLQTLGPLFI |
| | ANNDKGDDYFELQHNNPGHLNYAFFRINDHIAIPGASIRGMISSVFETLTHSCFRVMD |
| | DKKYLTRRVIPESETTQKRKSGRYQVEESDPDLFPGRVQKKGNKYKIEKMDEIVRLPI |
| | YDNFSLVERIREYHYSEECASYVPSVKKAIDYNRMLAQAADSNREFLYNHPEAKSILQ |
| | GKKEVYYILHKQESKNRGKTKEINPNARYACLTDENTPGSRKGFIKFTGPDMVTVNK |
| | ELKSKIAPIYDPEWEKDIPDWERSNQESNHKYSFILHNEIEMRSSQKKKYPRPVFICKK |
| | NGVEYRMQKRCERIFDFTKEEEKDKEIVIPQKVVSQYNAILKDNKENTETIPGLFNSK |
| | MVNKELEDGDLVYFKYKEGKVTELTPVAISRKTDNKPMGKRFPKISINGKMKPNDSL |
| | RSCSHTCTEDCDDCPNLCESVKDYFKPHPDGLCPACHLFGTTFYKSRLSFGLAWLEN |
| | NAKWYISNDFQQKDSKKEKGGKLTLPLLERPRPTWSMPNNNAEVPGRKFYVHHPWS |
| | VENIKNNQGNQKDISLKPDSDAIKIKENNRTIEPLGKDNVFNFEISFNNLRDWELGLLL |
| | YAIELEDHLAHKLGMAKAFGMGSVKIEIKNLLIKGSINDISKAELIKKGFKKLGIDSLE |
| | KDDLSEYLHIKQLREILWFSDKPVGTIEYPKLENKTNSRIPSYTDFVQEKDHETGFKNP |
| | KYQNLKSRLHILQNPWNAWWKNEE |
| SEQ ID NO: 5 | MTTTMKISIEFLEPFRMTKWQESTRRNKNNKEFVRGQAFARWHRNKKDNTKGRPYIT |
| WP_124327589 | GTLLRSAVIRSAENLLTLSDGKISEKTCCPGKFDTEDKDRLLQLRQRSTLRWTDKNPC |
| | PDNAETYCPFCELLGRSGNDGKKAEKKDWRFRIHFGNLSLPGKPDFDGPKAIGSQRV |
| | LNRVDFKSGKAHDFFKAYEVDHTRFPRFEGEITIDNKVSAEARKLLCDSLKFTDRLCG |
| | ALCVIRFDEYTPAADSGKQTENVQAEPNANLAEKTAEQIISILDDNKKTEYTRLLADAI |
| | RSLRRSSKLVAGLPKDHDGKDDHYLWDIGKKKKDENSVTIRQILTTSADTKELKNAG |
| | KWREFCEKLGEALYLKSKDMSGGLKITRRILGDAEFHGKPDRLEKSRSVSIGSVLKET |
| | VVCGELVAKTPFFFGAIDEDAKQTDLQVLLTPDNKYRLPRSAVRGILRRDLQTYFDSP |
| | CNAELGGRPCMCKTCRIMRGITVMDARSEYNAPPEIRHRTRINPFTGTVAEGALFNME |
| | VAPEGIVFPFQLRYRGSEDGLPDALKTVLKWWAEGQAFMSGAASTGKGRFRMENAK |
| | YETLDLSDENQRNDYLKNWGWRDEKGLEELKKRLNSGLPEPGNYRDPKWHEINVSI |
| | EMASPFINGDPIRAAVDKRGTDVVTFVKYKAEGEEAKPVCAYKAESFRGVIRSAVARI |
| | HMEDGVPLTELTHSDCECLLCQIFGSEYEAGKIRFEDLVFESDPEPVTFDHVAIDRFTG |
| | GAADKKKFDDSPLPGSPARPLMLKGSFWIRRDVLEDEEYCKALGKALADVNNGLYP |
| | LGGKSAIGYGQVKSLGIKGDDKRISRLMNPAFDETDVAVPEKPKTDAEVRIEAEKVY |
| | YPHYFVEPHKKVEREEKPCGHQKFHEGRLTGKIRCKLITKTPLIVPDTSNDDFFRPADK |
| | EARKEKDEYHKSYAFFRLHKQIMIPGSELRGMVSSVYETVTNSCFRIFDETKRLSWRM |
| | DADHQNVLQDFLPGRVTADGKHIQKFSETARVPFYDKTQKHFDILDEQEIAGEKPVR |
| | MWVKRFIKRLSLVDPAKHPQKKQDNKWKRRKEGIATFIEQKNGSYYFNVVTNNGCT |
| | SFHLWHKPDNFDQEKLEGIQNGEKLDCWVRDSRYQKAFQEIPENDPDGWECKEGYL |
| | HVVGPSKVEFSDKKGDVINNFQGTLPSVPNDWKTIRTNDFKNRKRKNEPVFCCEDDK |
| | GNYYTMAKYCETFFFDLKENEEYEIPEKARIKYKELLRVYNNNPQAVPESVFQSRVA |
| | RENVEKLKSGDLVYFKHNEKYVEDIVPVRISRTVDDRMIGKRMSADLRPCHGDWVE |
| | DGDLSALNAYPEKRLLLRHPKGLCPACRLFGTGSYKGRVRFGFASLENDPEWLIPGK |
| | NPGDPFHGGPVMLSLLERPRPTWSIPGSDNKFKVPGRKFYVHHHAWKTIKDGNHPTT |
| | GKAIEQSPNNRTVEALAGGNSFSFEIAFENLKEWELGLLIHSLQLEKGLAHKLGMAKS |
| | MGFGSVEIDVESVRLRKDWKQWRNGNSEIPNWLGKGFAKLKEWFRDELDFIENLKK |
| | LLWFPEGDQAPRVCYPMLRKKDDPNGNSGYEELKDGEFKKEDRQKKLTTPWTPWA |
| SEQ ID NO: 6 | MSKTDDKIDIKLTFLEPYRMVNWLENGLRMTDPRYLRGLSFARWHRNKNGKAGRPY |
| KKO18793 | ITGTLLRSAVIRAAEELLSLNLGKWGKQLCCPGQFETEREMRKNKTFLRRRPTPAWSA |
| | ETKKEICTTHGSACAFCLLLGRRLHGGKEDVNEDAPGSCRKPVGFGNLSLPFQPTKRQ |
| | IQDVCKERVLNRVDFRTGKAQDYFRVFEIDHEDWGVYTGEITITEPRVQEMLEASLKF |
| | VDTLCGALCRIEIVGSADETKRTTSSKEGCPASTTTRDCSSSENDDTSPEDPVREDLKK |
| | IAHVIANAFQNSGNREKVHALADAIRAMRLEESSIINTLPKGKSEKTTEQIEVNKHYL |
| | WDEIPVNDTSVRHILIEQWRRWQSKKDDPEWWKFCDFLGECLYKEYKKLTSGIQSRA |
| | RVMGETEYYGALGMPDKVIPLLKSDKTKEWILVGSLKAETPFFFGLETEQTEEVEHTS |
| | LRLVMDKKGRFRIPRSVLRGALRRDMRIAFDSGCDVKLGSPLPCDCSVCQVMRSITIK |
| | DSRSEAGKLPQIRHRIRLNPFSGTVDEGALFDIEVAPEGVIFPFVMRYRGEEFPPALLSV |
| | IRYWQDGKAWLGGEGATGKGRFALAKDLKMYEWKLEDKSLHAYIDTYGHRGNEH |
| | AIGTGQGIDGFRSGSLSDLLSDISKESFRDPLASYHNYLDKRWIKVGYQITIGAPLLSAD |
| | PIGALLDPNNVDAIVFEKMKLDGDQVKYLPAIKGETIRGIVRTALGKRNNLLAKNDH |
| | DDCTCSLCAIFGNENETGKIRFEDLEVYDKDIAKKIDHVAIDRFTGGARDQMKFDTLP |
| | LIGSPERPLRLKGLFWMRRDVSPDEKARILLAFLEIREGLYPIGGKTGSGYGWVSDLEF |
| | DGDAPEAFKEMNSKRGKQASFKEKISFRYPSGAPKHIQNLKATSFYYPHYFLEPGSKV |
| | IREQKMIGHEQYYESYPSGASGEKLLSGRIICSMTTHTPLIVPDTGVIKDPENKHATYD |
| | FFQMNNAIMIPGSEIRGMISAVYEAMTNSCFRIFHEKQYLTRRISPEDKELREFIPGIVRI |
| | INGDVYIEKAEREYRLPLYDDVHIITNYEELEYEKYIKKNPGREQKIKNAHRFNKNIAR |
| | IAESNRNYLCSLDRAVRREILSGRKKVNFRLVKVNDNKNPDKEAVELCKTGPLEGLV |
| | KFSGLNAVNISNLRPGTAEEGFDAKWDMWSLNIILNRMDVRNSQKKEYPRPALHFNH |
| | DGKEYTIPKRCERVFVRAEAGKRAETEGSYKVPRKVQEQYQNILRDYESNIGHIDNTF |
| | RTLIENCGLNNGSLVYFKPDNSRKEVVAITPVKISRKTDRLPQGDRFPHTSSDLRPCVR |
| | DCLDTEGDIRMLENSPFKRLFHIHPEGLCPACQLFGTTNYRGRVRFGFASLSDGPKWF |
| | RKDEGNETCHITLPLLERPRPTWSMPDDTSTIPGRKFYVHHMGYETVKKNQRTLVKT |
| | ENNRTVKALDKENEFTFEVFFENLREWELGLLLHCLELEPEMGHKLGMGKPLGFGSV |
| | KIRIDKLQKCVVNVKDGCVLWEPEEDKIQHYIAKGLGKLTTWFGKEWDRLEHIQGLR |
| | SLQRLLPL |
| SEQ ID NO: 7 | FESYARWCKSNSGLWKPYIPGTLLRSAVLESVEYLLALIGSKNKVEICPGLYTQSENN |
| RLC14096B | PDTKYLRRRPWYELHAQKEICKTRDTACPLCLLMRTKLDNDGDGETEKNVKFGNLY |
| | PTSPLEPLQKIRPRILNRMDPGTSKARDYFRVFEIENQLCSQFRGWIWLSGDLPNMELV |
| | KSLLAAGLSNVATLAGAVCRIRIVSTDNPSMKQDLTTQDLIDDFTNYYLKGDTPPANL |
| | AASGKGDAFPRFSPGSGDHPDTTGVSHADMASSHEGTALAKDIAEKCKDILSQISASE |
| | QLRRLADIMRDLRQDSNREIMYRQVAEENHEKASLLYKKTKKGDSIAALIAGKTEGM |
| | DAETWRRLCEFLGQTFYGEAKEAGLVETPVPRILGESERYSLQKKPTVRTDLAAELVP |
| | DIEFIIKGNLIAETPFFFGTDIATETHTDLPILLTSDRHFRIPRSVLRGILRRDLRLVTGSG |
| | CSVKLGRSEPCACDVCQIMRSLTMRDCVSSCKVPPEIRHRIRLNPVTETVEEGALFDM |
| | EIGPQGISFPFVLRSRGVNSSFSTRLKNVLTWWSEGKIFMGGDKGTGKGRFTLAELEA |
| | YYFRLTTKRIGKNVWVIGNYLKSQGWRGAELETHFDSLKEWKSLSFSDSDVKVFTW |
| | HKITWKVSFEGPVLTNDPIAADIRNESDAVFYQKSVAGEKGPVYALKGEGLRGIVSSS |
| | LCKKKNLSSNLHEDCECLRCKIFGSKHQEGNIRFEDMTVSQESEVREKLFDHVSIDRFT |
| | GGAANKLKFDDKPLVGNPLVFQGVFWVHQSIGNNEKTQEALSDAFKDVRDGLYPVG |
| | AKGSIGYGWIKGIEVVEGPDWLKDALSAEKTVEAGIASEESEYKLPDLPWISLLPKGR |
| | AIYNPHYFLGIPKVTPEREREPVGHDRFQTDLHTGRIICTLKTITPLIIPDTENDKAFEVE |
| | NASADHERFKFMRMGSQAAIPGSAIRSMTSSVFEALTNSCFRVLDQKSHLSWRMEAD |
| | DAGDYKPGRFEKKDDKAVIRKFKKKARFPFYAGPDTREAFTSDQIMGKEKVTLWVK |
| | DFEASLTVPDEIGWKKKRGYLKVTGPNKVEIDTENISENNPSPPDSWQDVRINDDGTIP |
| | DKKNRKFICQYGTTTYTVDKWCEAFFCDEEKDPYELAPDVERKYRLLMDSYHNNPQ |
| | APPQIFRSLPLFSETGPKKTLEHGDLVYFRLSEVNKQSQSKKQVRERVTDIVPVSISRIA |
| | NNQPIGKHIAAAFRPCAYVCIEECEPCDAKTCPIPVYREGYPIKGLCRACHLFGTTGYK |
| | GRVRFSFAKLNGDAVWAKGAGGKDYFTLPLLEKPRPTWTMPNEGAKIPGRKFYVHH |
| | NEWKTVQEGKNPIDQKAIRPNPNNSSVEVLNLGNEFQFEVSFENLEEWELGLLLYCLE |
| | LEPGLAHKLGRGKAFGFGSIEAEVSKIEMRIKSGTWKNETSGKEKFIQSGLSQVPSFFK |
| | QDEKQWNKVEQVKNIRKLLQLSWNKGNAVEPEVRYPALREKDDENKRPGYVELKD |
| | NGYDAGKKLVSPWAPWHPIKK |
| SEQ ID NO: 8 | MTKKPGTEDKATLWGKESASKSVKTILEESIQGFTVEQKRSFFANLADQLVSRAGEQ |
| OGR07205 | GAKSVRSQGLIIGRKENYAKPSAQEPTRHHLYRQPSNASAFLATGWLIAETPFFIGSGT |
| | EGQKQTDDQAESLHLRTLRDGHGRFRIPFTTIRGVMDKELRDILQAGCAKGRSLRAPC |
| | PCQVCTLMRRIQVRDAIAADILPPDLRMRTRIDPSHGTVAHLFSLEMAPQGLKLPFFLK |
| | LKGVETIDPDKELLEILNDWSAGQCFLGGLWGTGKGRFRLDDLQWHRLELDNADYY |
| | TPLLQDRFFAGETISDLRQGLQSINIQPERIPAQTPSRNMPYCRVDCILEFKSPVLSGDP |
| | VAALFESDAPDNVAYKKPVVQYDETGRLRFIDPGPVEMLTCLKGEGVRGVVAYLAG |
| | KAYDQHDLSHDSCNCTFCQAFGNGQKAGSLRFDDFMPVQFESDQAGNFSWSPHTPH |
| | AMRSDRVALDVFGGAMPEAKFDDRPLAASPGKPLNFKSTIWYREDMGKEAGKALKR |
| | ALIDLQNNMAAIGSGGGIGRGWVSRVCFEGDIPDFLEDFPEPITVTEPEQDSQLLKNQA |
| | VADETAVSACDTADAPHPLAVTLEPGARYFPRVIIPRAPTVKRDECVTGQRYHTGRLS |
| | GKIFCELNTLGPLFVPDTDYSAGVPVPISDEQLAECQLQAVFENTSKFNEFFATYPEET |
| | VTKLKDLLCAADDKWILAVKDITADLRQEIGEDTFQRIIRKAGHKTQRFHQINDEIGLP |
| | GASLRGMVLSNYQILTNSCYRNLKATEEITRRMPADEAKYRKAGRVTVSGDGAQKK |
| | YSIQEMEVLRLPIYDNMNTPDNMPDVAKQATTAKRCNNLMNEAAKTSRVELKARW |
| | REGQSKIKYQIIDALNKVDPIIQVISSSKQINPNNGKTGWGYVKYTGANVFAKSLVAPI |
| | DCLRKKDAGHVCCQVNLNPAWEASNFDILINEKCPVERQSGPRPTLRCKGQDSAWY |
| | TLTKRSERIFTDKKPVPDPINIPPREVKRYNELRDSYKKNTAHVPKPLQTFFNQESLAN |
| | GDLVYFEVNQFGEASQLTPVSISRTTDLFPIGGRLPQGHKDLFPCTAMCLSECKNCVP |
| | ASFCEFHSRSHEKLCPACSLAGTTGNRGRIKFSEAWLSGLPKWHSVSQDNVGRGLGV |
| | TMPRLERSRRTWHLPTKDAYLLGQSIYLNHPVPAILPSDQVPSENNQTVEPLGPKNIFS |
| | FQLAFDNLSIEELGLLLYSLELESGMAHRLGRGRALGMGSVQISVKDIQIRDNKSFLFS |
| | SNISKKSEWIQCGKDEFAQEAWFGESWDNIDHIQRLRQALTIPVKGDVGCIRYPKLEA |
| | EGGMPDYIKLRKRLTPLCDREEPVRYRINPVQLARMILPFVPWHGACPALLNEQVMIE |
| | AKRLTELXXXDRANWPC |
| SEQ ID NO: 9 | ASEDDDTPTLRKVLKDEINGQEDMWRKFCEALGNSLYDLSKKAKERKRTEALPRLLG |
| RLC14096 | ETEIYGLPMRENKEDEPLPSSLTYKFKWLIAGELRAETPFFFGTEVQEGQTSATILLNR |
| | DGYFRLPRSVIRGALRRDLRLVMGNDGCNMPIGGQMCECGVCRVMRHIVIEDGLSDC |
| | KIPPEVRHRIRLNCHTGTVEEGALFDMETGYQGMTFPFRLYCETENSDLDSYLWEVL |
| | NNWQNGQSLFGGDTGTGFGRFELTEPKVFLWNFSKKEKHEAYLLNRGFKGQMPVQD |
| | VKTKSFKTKTWFQIHRELDISPKKLPWYSTDYRFNVTSPLISRDPIGAMLDPRNTDAIM |
| | VRKTVFCPDPNAKNRPAPATVYMIKGESIRGILRSIVVRNEELYDTDHEDCDCILCRLF |
| | GSIHQQGSLRFEDAEVQNSVSDKKMDHVAIDRFTGGGVDQMKFDDYPLPGCPAQPLI |
| | LEGKFWVKDDIDDESKSALEKAFADFRDGLVSLGGLGAIGYGQIGDFELIGGSADWL |
| | NLPKPEENRTDVPCGDRSAQGPEIKISLDADKIYHPHFFLKPSDKNVYRERELVSHAK |
| | KKGPDGKSLFTGKITCRLSTEGPVFIPDTDLGEDYFEMQASHKKHKNYGFFRINGNVA |
| | IPGSSIRGMISSVFEALTNSCFRVFDQERYLSRSEKPDPTELTKYYPGKVKRDGNKFFIL |
| | KMKDFFRLPLYDFDFEGEAESLRPNYDEDRNEEENKGKNKNTQKVKNAVEFNIKMA |
| | GFAKHNRDFLKKYKEQEIKDIFMGKKKVYFTAGKHKPNEAHDNDKIALLTKGSNKK |
| | AEKGYFKFTGPGMVNVKAGVEGEECDFHIDESDPDVYWNMSSILPHNQIKWRPSQK |
| | KEYPRPVLKCVKDGTEYVMLKRSEHVFAEASSEDSYPVPGKVRKQFNSISRDNVQNT |
| | DHLSSMFQSRRLHDELSHGDLVYFRHDEKRKVTDIAYVRVSRTVDDRPMGKRFKNE |
| | SLRPCNHVCVEGCDECPDRCKELEDYFSPHPEGLCPACHLFGTTDYKGRVSFGLGWH |
| | ESNTPKWYMPEDNSQKGSHLTLPLLERPRPTWSMPNKKSEIPGRKFYVHHPWSVDKI |
| | RNRQFDPAKEKQPDDVIKPNENNRTVEPLGKGNEFTFEVRFNNLREWELGLLLYSLEL |
| | EDNMAHKLGMGKALGMGSARIKAEAIELRCESAGQNAELKDKAAFVRKGFETLEID |
| | KPGENDPMNFDHIRQLRELLWFLPENVSANVRYPMLEKEDDGTPGYTDFIKQEEPST |
| | GKRNPSYLSSEKRRNILQTPWKHWYLIPPFQASAQSETVFEGTVKWFDDKKGFGFIKI |
| | NDGGKDVFVHHSSIVGTGFKSLNEGDSVAFKMGVGPKGPCAEKVKKIGN |
| SEQ ID NO: 10 | MRRQRLLGDAEYYGGTGREQPASIVISTDSDPDHKVYEWIITGQLKAETGFFFGTKAG |
| OPY65763 | AGGHTDLSILLGKDGHYRVPRSVFRGALRRDLRVAFGAGCRVEVGRERPCECPVCKV |
| | MRQITVMDTISSYREAPEIRQRIRLNPYTGTVDKGALFDMEVGPEGIEFPFVLRFRGSK |
| | SFPSELAAVIGSWTKGTAWLGGAAATGKGRFSLLGLSIHKWNLSTAEGRKSYLAAYG |
| | LRDAADKTVKRLSIDKGGKGDVGLPAGLERDALPSSVREPLWKKLVCTVDFSSPLLL |
| | ADPIAALLGVEGDERIGFDNIAYEKRRYNGETNTTESIPAVKGETFRGIVRTALGKRHG |
| | NLTRDHEDCRCRLCAVFGKEQEAGKIRFEDLMPVGAWTRKHLDHVAIDRFHGGAEE |
| | NMKFDTYALAASPTNPLRMKGLIWVRSDLFETGHDGPTPPYVKDIIDALADVKRGLY |
| | PVGGKTGSGYGWIKDVTIDGLPQGLSLPPAEERVDGVNEVPPYNYSAPPDLPSAAEGE |
| | YFFPHVFIKPYDKVDRVSRLTGHDRFRQGRITGRITCTLKTLTPLIIPDSEGIQTDATGH |
| | KMCKFFSVAGKPMIPGSEIRGMISSVYEALTNSCFRVFDEEKYLTRRVQPKKGAKSSE |
| | LVPGIIVWGQNGGLAVQQVKNAYRVPLYDDPAVTSAIPTEAQKNKERWESVPSVNL |
| | QGALDWNLTTANIARDNRTFLNSRPEEKDAILSGTKPISFELEGTNPNDMLVRLVPDG |
| | VDGAHSGYLKFTGLNMVLKANKKTSRKLAPSEEDVRTLAILHNDFDSRRDWRRPPNS |
| | QRYFPRSVLRFSLERSTYTIPKRCERVFEGTCGEPYSVPSDVERQYNSIIDDISKNYGRIS |
| | ETYLTKTANRKLTVGDLVYFIADLDKNMATHILPVFISRISDEKPLGELLPFSGKLIPCE |
| | GEPPTILKKMAPSLLTEAWRTLISTHLEGFCPACRLFGTTSYKGRIRFGFAEHTGTPKW |
| | LREELDWARPFLTLPIQERPRPTWSVPDDKSEVPGRKFYLHHHGGNRIVESNLRNRPE |
| | VNQTKNNSSVEPISAGNTFTFDVCFENLEAWELGLLLYCLELSPKLAHKLGRAKAFGF |
| | GSVKIHVERIEERTTDGAYQDVTAVKKNGWITTGHDKLREWFHRDDWEDVDHIRNL |
| | RTVLRFPDADQEHDVRYPELKANNGVSGYVELRDKMTASERQESLRTPWYRWFPQN |
| | GTGGSGRHEQAATSQEQDTAKDESVLSATQRRQAVIDVSDPDERLSGTVESFDRQKG |
| | DGYIGCGVRQFYVRLEDIRSRTALCEGQVVTFRARKEWEGHEAYDVEIDQ |
| SEQ ID NO: 11 | MLEKALADFRDGVVSLGGLGAIGYGRIGDFEVAEESGTWLKIPEKKLPEDSVQCGER |
| RLC02083 | YRFSSDPATRFEKEKIYYPHYFLKPSDEDVRRETRLVSHVYQEDTDGKTRLLTGTIRC |
| | RLTTEGPIFIPDTDDPKEDYFQMEIEGHKSYGFFRINEQVAIPGSSIRGMVSSVFEALTN |
| | SCFRVFDQKRYLSRSTKPDPRELEKYLPGKVKRIDNKWVLLELEDIFRLPLYDLKDVG |
| | PKSLDSAYGLEKFKNEKRFRLKKIENAVAFNKKMAGYAKHTREFLKNNYTETELGKI |
| | LRGEMKVWFTIGHKPNSAHDNDKIALLTKKTNKRAKSGFIKFTGPSMVNIKADASNS |
| | DCEECRFDMKSEDKDGLIFHNAIECRPSQKKEYPRPVLKCVKEAVEYTMIKRCEQVFS |
| | EGKKPPRSYSIPDKSRRQYNGILKDNRDNTEHIPSFFRNRMKNKELSDEDLVYFRYKG |
| | KKVTNIAPVRVSR |
| SEQ ID NO: 12 | QYNLPLNPDAFPKFRWIVTGHLRAETPFFFGRGEIKDRTIEEETEQTSKTILLNKDNFFR |
| RLC02082 | LPRSVIRGALRRDLRLVIGNGCNTPVGGKFCECDVCRIMRHVVVEDTISSCRKPPEIRY |
| | NIRLNGHTRTVEEGALFDTETGYQGMRFPFRLCFETRASEFDPDTSEPIPKFDPYLSEV |
| | MKHWKAGQAVFGGDTGAGFGRFRLEGDIRFFSMDVAKKEEYDPYLLARGFKGMSS |
| | QEILEKIGSGRTYDWNSVPKIALNIPPNKLPWKEICYTIEVISPLISRDPIRAMMDPRNT |
| | DTIMIRKRVFVPDGKGGTLPEPESRYFIKSETLRGILRSLVGGNKTADGEYLCDLDHED |
| | CDCVQCRLFGSIHQQGCLRFEDAEVWNSVRDKKMDHVAIDRFTGGALDQMKFDDYP |
| | LLGCPEYPVILGGRFWIRDDISDKEKEIA |
| SEQ ID NO: 13 | MESIPVTLTFLEPYRVVEWYANEDRRSAERYLRGQSFARWHRKKNDKKGRPYITGTL |
| OPY65764 | LRSAAIRAAEELLSLSGGVWDGQHCCKGQFLSGGVKPEYMRKRPTYIWAEKEGACS |
| | APDYCPFCIFLGDRDQAEKKAESQNGYPDKSYHIRFGNLSLPDPPPLLDLKEVAVERT |
| | LNRVDFQTAKAHDYFKVWEISHEDLGVYTGQIVIHYTGPWQEKVKSLLEGSLRFVDR |
| | LCGALCKIEMAPKPARPLPKSLSVDMTEHAKIIVTAFDDAKKAEKVRGLADAMRSMG |
| | SKGPTILDKLPAGHDDRDHHTWDVTIVDKTPLRTYLKGVLRADDAASWPALCKALG |
| | NALYDVSQG |
| SEQ ID NO: 14 | EKQGFRDKGFNIVGSLKDAIGKEIGLREISLRPAKEETMPRWQCVEYTIIVNSPLHTAD |
| RME63343 | PIEALLHSGNYDSVVYKKTVVRNGNIKQIPVFKGETIRGIVRTAFARILRTENVEFDEE |
| | HEDCTCPLCQVFGNEHRAGRVRFEDLVIEGYTSEKKFDHVSIDRFTGGAAEKRKFDD |
| | LSLKGSPRRPIVLRGKVWIRNDMDSKGIEKLKQAFMDIRDGLYPLGSRGGIGYGWVT |
| | DLKIENTEVEEFRLDKVSTTEGSGPATEEFNFPSLPEIQLNKDAVYHPHYFIRPHEKVN |
| | REIRPVGHERFHDDLLTGRIKCTLKTLTPLIIPDTEDPDAFGLQAEHKGHQNFRFFR |
| SEQ ID NO: 15 | MKSIPITLTFLEPYRILPWAEKGKRDKKEYLRGANYVRLHKDKNGKFKPYITGTLIRS |
| Ga0190306_ | AVLSAIEMLLDITNGEWNGKECCLAKFHTEGEKPSFLRKKPIYIRAEKDEICTSRETAC |
| 10003932 | PLCLILGRFDKAEKKEKDKEKFDVHFSNLNLYSSKEFSTIEELAPKRALNRIEQYTGKA |
| | QDYFTVYEALNKEFWTFKGRIRIKEDIYDKVTDLLFSALRCVEKIAGALCRIEIDKEPS |
| | QQKGFVKRQLSKQAKEDIEKIFQVVKDAQKLRLLSDCFRELTRMANKDELALPLGPE |
| | DDGHYLWDKIKVEGKTLRIFLRNCFSQYKDNWLCFCDEASKKGYQKYREKRHKLTD |
| | RELPTATPKHFAEKKDPQISPIYIDKDDKVYEWIIVGRLIAQTPFHFGDEEKAEGAILLT |
| | PDNRFRLPRTALRGILRRDLKLAGASACEVEVGRSEPCPCDVCKIMRRVTLLDTVSED |
| | LRDFLPELRKRIRINPQSGTVAEGALFDTEVGPEGLSFPFVLRYKCEKLPDSLTTVLCW |
| | WQEGLAFLSGESATGKGRFRLEINGAFVWDLQKGLFNYIKNHGFRGEERLFLEGNEA |
| | ELEKMGIQINTELLQPEMIKKEKNFTDFPYDLIKYQLNISSPLLLNDPIRAIALYEGEGK |
| | APDAVFFKKYVFENGKIEEKPCFKAESIRGIFRTAVGRIKNVLIKNHEDCICVLCHLFG |
| | NVHETGRLKFEDLKIVSGQEEKFFDHVAIDRFLGGAKEKYKFDDKPIIGAPDTPIVLEG |
| | KIWVKKDINDEAKETLSQAFSDINTGIYYLGANGSIGYGWIEEVKALKAPSWLKIKEK |
| | PNFEKDTSLNISAIMNEFKKDIQTLNLDKTYLPYGFLKLLEKVKRTSSPITHERFYENH |
| | LTGFIECSLKVLSPLIIPDTETPEKEENGHKYYHFLKIDNKPIIPGAEIRGAVSSIYEALTN |
| | SCFRVFGEKKVLSWRMEGKDAKEFMPGRVSKKKGKLYMVKMQALRLPVYDNPALA |
| | NEIRSGSIYEKYKNSKVEIIFFQTVEGIRKFLRGNFNNVEWKKVLVTGIDPLAILPSQKIP |
| | GNDKWVKNLQSKISPVRGYFKFTGPNKIETKRREEEKDEKLRTKANKVSCLQKDKW |
| | YEAMENHVEYKQDYTPPNSPKTEPLERPRNIPCFVCSDKEKIYRMTKRCERVFVSLGE |
| | NAPKYEIPISAIKRYEVILSAYRENWERNKTPELFRTRLPGDGRTLNEDDLVYFRADEN |
| | EKVKDIIPVCISRIVDEVPLIKRLSQELWPCVLAECPLLGFECKKCELEGLPEKIWFRIN |
| | KDGLCPACRLFGTQIYKSRVRFSFAYAKNWKFYDGYITLPRLESPRATWLILKEKDKH |
| | YIKYKVCGRKFYLHNSTYEDIINNSKKEKEKKTENNASFEVLKEGEFTFKVYFENLEN |
| | WELGLLLLSLTGLGEAIKIGHAKPLGFGSVKIEAKKIYFREEAGKFHPCEKADEYLKK |
| | GLNKLTSWFGKNEINEHMRNLLLFMTYYQNLPKVKYPDFDGYAKWRCSYVEQDKV |
| | EYFQNRWIVAS |
| SEQ ID NO: 16 | MIINITVKFLGPFRMLEWTDPDNRNRKNREFMRGQAFARWHNSNPQKGSQPYITGTL |
| Ga0193932_ | VRSAVIRSAENLLMLSEGKVGKEKCCPGEFRTENRKKRDAMLHLRQRSTLQWKTDK |
| 104825 | PLCNGKSLCPICELLGRRIGKTDEVKKKGDFRIHFGNLTPLNRYDDPSDIGTQRTLNRV |
| | DYATGKAHDFFKVWEIDHSLLSVFQGKISIADNIGDGATKLLEDSLRFTDRLCGAICVI |
| | SYDCIENSDGKENGKTGEAAHIMGESDAGKTDAENIANAIADMMGTAGEPEKLRILA |
| | DAVRALRIGKNTVSQLPLDHEGKENHHLWDIGEGKSIRELLLEKAESLPSDQWRKFCE |
| | DVGEILYLKSKDPTGGLTVSQRILGDEAFWSKADRQLNPSAVSIPVTTETLICGKLISET |
| | PFFFGTEIEDAKHTNLKVLLDRQNRYRLPRSAIRGVLRRDLRTAFGGKGCNVELGGRP |
| | CLCDVCRIMRGITIMDARSEYAEPPEIRHRIRLNPYTGTVAEGALFDMELGPQGLSFDF |
| | ILRYRGKGKSIPKALRNVLKWWTKGQAFLSGAASTGKGIFRLDDLKYISFDLSDKDK |
| | RKDYLDNYGWRNRIEALSLEKMPLDRMNDYAEPLWQKVSVEIEIGSPFLNGDPIRALI |
| | EKDGSDIVSFRKYADDSGKEVYAYKAESFRGVVRAALARQHFDKEGKPLDKEGKPL |
| | LTLIHQDCECLICRLFGSEHETGRLRFEDLLFDPQPEPMIFDHVAIDRFTGGAVDKKKF |
| | DDCSLPGTPGHPLTLKGCFWIRKELEKPDEDKSEREALSKALADIHNGLYPLGGKGAI |
| | GYGQVMNLKIKGAGDVIKAALQSESSRMSASEPEHKKPDSGLKLSFDDKKAVYYPH |
| | YFLKPAAEEVNRKPIPTGHETLNSGLLTGKIRCRLTTRTPLIVPDTSNDDFFQTGVEGH |
| | ESYAFFSVNGDIMLPGSEIRGMLSSVYEALTNSCFRVFDEGYRLSWRMEADRNVLMQ |
| | FKPGRVTDNGLRIEEMKEYRYPFYDRDCSDKKSQEAYFDEWERSITLTDDSLEKMAE |
| | RKGDISPKDLKVLKSLKGKNYKSTEGLLAAFKDKGGDTGGNILGLIFKYAERIGDVPR |
| | YEHPTDTDRMMLSLSEYNRNQKSDGKRAYKIIKPASKLGKGAYFMFAGTSVENKRIC |
| | NPACTDKANKSVKGYLKISGPNKLEKYNISEPELDGVPEDRNCQIIHNRIYLRKIFVAN |
| | AKKRKERDRLVGEFACYDPEKKVTYSMTKRCERIFIKDRGRTLPITHEASELFEILVQE |
| | YRENAKRQDTPEVFQTLLPDNGRLNPGDLVYFREEKGKTVEIIPVRISRKIDDSPIGKR |
| | LREDLRPCHGEWIEGDDLSQLSEYPEKKLFTRNTEGLCPACRLFGTGAYKGRLRFGFA |
| | KLENDPKWLMKNSDGPSHGGPLTLPLLERPRPTWSMPDDTLNRLKKDGKQEPKKQK |
| | GKKGPQVPGRKFYVHHDGWKEINCGCHPTTKENIVQNQNNRTVEPLDKGNTFSFEIC |
| | FENLEPYELGLLLYTLELEKGLAHKLGMAKPMGFGSIDIEVENVSLRTDSGQWKDAN |
| | EQISEWTDKGKKDAGKWFKTDWEAAEHIKNLKKLLFLPGEEQNPRVIYPALKQKDIP |
| | NSRLPGYEELKKNLNMEKRKEMLTTPWAPWHPIKK |
| SEQ ID NO: 17 | MTQITIQVTFFHPFRVVPWNHRDHRKTDRKYLRGGTFAKWHCTASEGKSGRPYITGT |
| Ga0190283_ | LLRSALFAEIEKLIAFHDPFKCCRGKDKTENGNAKPLFLRRRPRADCDPCGTCPLCLL |
| 10011062 | MGRSDTVRRDAKKQKKDWSVHFCNLREATERSFNWKETAIERIVNRVDPSSGKAKD |
| | YMRIWEIDPLVCSQFNGIITINLDTDNAGKVKLLMAAGLAQINILAGSICRADIISEDHD |
| | ALIKQFMAIDVREPEVSTSFPLQDDELNNAPAGCGDDEISTDQPVGHNLVDRVRISKIA |
| | ESIEDVFSQEQKAQQLRRMADAIRDLRRSKPDETTLDALPKGKTDKDNSVWDKPLKK |
| | DILPSPRMPASEDDDTPTLRKVLKDEINGQEDMWRKFCEALGNSLYDLSKKAKERKR |
| | TEALPRLLGETEIYGLPMRENKEDEPLPSSLTYKFKWLIAGELRAETPFFFGTEVQEGQ |
| | TSATILLNRDGYFRLPRSVIRGALRRDLRLVMGNDGCNMPIGGQMCECGVCRVMRHI |
| | VIEDGLSDCKIPPEVRHRIRLNCHTGTVEEGALFDMETGYQGMTFPFRLYCETENSDL |
| | DSYLWEVLNNWQNGQSLFGGDTGTGFGRFELTEPKVFLWNFSKKEKHEAYLLNRGF |
| | KGQMPVQDVKIKSFKIKTWFQIHRELDISPKKLPWYSTDYRFNVTSPLISRDPIGAML |
| | DPRNTDAIMVRKTVFCPDPNAKNRPAPATVYMIKGESIRGILRSIVVRNEELYDTDHE |
| | DCDCILCRLFGSIHQQGSLRFEDAEVQNSVSDKKMDHVAIDRFTGGGVDQMKFDDYP |
| | LPGCPAQPLILEGKFWVKDDIDDESKSALEKAFADFRDGLVSLGGLGAIGYGQIGDFE |
| | LIGGSADWLNLPKPEENRTDVPCGDRSAQGPEIKISLDADKIYHPHFFLKPSDKNVYRE |
| | RELVSHAKKKGPDGKSLFTGKITCRLSTEGPVFIPDTDLGEDYFEMQASHKKHKNYGF |
| | FRINGNVAIPGSSIRGMISSVFEALTNSCFRVFDQERYLSRSEKPDPTELTKYYPGKVKR |
| | DGNKFFILKMKDFFRLPLYDFDFEGEAESLRPNYDEDRNEEENKGKNKNTQKVKNAV |
| | EFNIKMAGFAKHNRDFLKKYKEQEIKDIFMGKKKVYFTAGKHKPNEAHDNDKIALLT |
| | KGSNKKAEKGYFKFTGPGMVNVKAGVEGEECDFHIDESDPDVYWNMSSILPHNQIK |
| | WRPSQKKEYPRPVLKCVKDGTEYVMLKRSEHVFAEASSEDSYPVPGKVRKQFNSISR |
| | DNVQNTDHLSSMFQSRRLHDELSHGDLVYFRHDEKRKVTDIAYVRVSRTVDDRPMG |
| | KRFKNESLRPCNHVCVEGCDECPDRCKELEDYFSPHPEGLCPACHLFGTTDYKGRVSF |
| | GLGWHESNTPKWYMPEDNSQKGSHLTLPLLERPRPTWSMPNKKSEIPGRKFYVHHP |
| | WSVDKIRNRQFDPAKEKQPDDVIKPNENNRTVEPLGKGNEFTFEVRFNNLREWELGL |
| | LLYSLELEDNMAHKLGMGKALGMGSARIKAEAIELRCESAGQNAELKDKAAFVRKG |
| | FEFLEIDKPGENDPMNFDHIRQLRELLWFLPENVSANVRYPMLEKEDDGTPGYTDFIK |
| | QEEPSTGKRNPSYLSSEKRRNILQTPWKHWYLIPPFQASAQSETVFEGTVKWFDDKKG |
| | FGFIKINDGGKDVFVHHSSIVGTGFKSLNEGDSVAFKMGVGPKGPCAEKVKKIGN |
| SEQ ID NO: 18 | MTKIPISLTFLEPFRLVDWVSESERDKSEFLRGLSFARWHRIKNQREDENQGRPYITGT |
| Ga0073580_ | LLRSAVIKAAEELIFLNGGKWQSEECCNGQFKGSKAKYRKVECPRRRHRATLKWTD |
| 1036305 | NTCSDYHNACPFCLLLGCLKPNSKENSDIHFSNLSLPNKQIFKNPPEIGIRRILNRVDFT |
| | TGKAQDYFYVWEVEHSMCPKFQGTVKINEDMPKYNVVKDLLISSIQFVDKLCGALC |
| | VIEIGKTKNYICQSFSSNIPEEEIKKLAQEIRDILKGEDALDKMRVLADTVLQMRTKGP |
| | EIVNELPRGIEKKGGHWLWDKLRLRKKFKEIANNYKDSWQELCEKLGNELYISYKEL |
| | TGGIAVKKRIIGETEYRKIPEQEISFLPSKAGYSYEWIILGKLISENPFFFGKETKTEEQID |
| | MQILLTKDGRYRLPRSVLRGALRRDLRLVIGSGCDVELGSKRPCPCPVCRIMRRVTLK |
| | DARSDYCKPPEVRKRIRINPLTGTVQKGALFTMEVAPEGISFPFQLRFRGEDKFHDAL |
| | QNVLVWWKEGKLFLGGGASTGKGRFKLEIEHVLKWDLKNNFHSYLQYKGLRDKGD |
| | FNSIKEIEGLKVETEEFKVKKPFPWSCVEYTIFIESPFVSGDPVEAVLDSSNTDLVTFKK |
| | YKLEESKEVFAIKGESIRGVFRTAVGKNEGKLTTENEHEDCTCILCRLFGNEHETGKV |
| | RFEDLELINDSAPKRLDHVAIDRFTGGAKEQAKFDDSPLIGSPDSPLEFTGIVWVRDDI |
| | DEEEKKALKSAFLDIKSGYYPLGGKKGVGYGWVSNLKIESGPEWLRLEVQEKSSQEN |
| | VLSPVILSEVMDIEFNPPKIDENGVYFPYAFLRPLNEVKRTREPIGHNEWKKSLISGYLT |
| | CRLELLTPLIIPDTSEEVIKEKVNNGEHPVYKFFRLGGHLCIPAAEIRGMISSVYEALTN |
| | SCFRVFDEKRLISWRMTAEEAKRPDPKKSEEQNRMRFRPGRIIKKDKKFYAQEMLEL |
| | RIPVYDNKDKRNEISQNDPTRPSEYNHPTEPERIFFSNAEKIRNFLKRNSNYLHGSTPLL |
| | FRQWSISNRYDKIALIGNKSQGHLKFTGPNKIEVSEGTKCPKYETIPGRDEWDKAVHN |
| | YVEPGKFVTVISRKKGQKPKAVQRRRNVPAFCCYDYNTNRCFVMNKRCERVFKVSR |
| | DKPKYEIPPDAIRRYEHVLRKYRENWERYDIPEVFRTRLPGDGETLNEGDLVYFRLDE |
| | NNRVLDIIPVSISRISDTQYLGRRLPDHLRSCVRECLYEGWGDCKPCKLSLFPEKMWIR |
| | INPEGLCPACHLFGTQVYKGRVRFGFARAGSNWKFREEQLTLPRFETPRPTWVIPKRK |
| | DEYQIPGRKFYLHHNGWEEIYKKNKKNEIKKEKNNATFENLKQGTFYFKVFEENLEL |
| | WELGLLIFSAELGGEEFAHKLGHGKALGFGSVKISVDKIILRRDPGQFEQRGQKFKRD |
| | AVDKGFCVLENRFGKTNFKIYLNNFLQLLYWPNNKKVKVRYPYLRQEDDPEKLPGY |
| | VELKKHQMLKDDNRYSLFARPRAVWLKWTEMVQRDKS |
| SEQ ID NO: 19 | MSVEEFYVRLTFLEPFRVVPWVRNGDERKGDRIYQRGGTYARWHKINDSHGQPYITG |
| Iso3TCLC_ | TMLRSAVLREIENTLTLHNTYGCCPGGTRTTEGKLEKPLYLRRRDGFEFENHAEKPCS |
| 1001005823 | EEDPCPLCLIQGRFDKLRRDEKKQFVRQGNISFCSVNFSNLNISSGIKSFSWEEIAVSRV |
| | VNRVDPNSGKAKDFFRVWEIDHKLCPNFLGKMSISLSEKLEDVKALLAVGLAQVNVL |
| | SGALCRVDIIDPETQKDTVHQHLIQQFVTRIQDKEKGDAADIPAFTLPPAGLSPSSNEW |
| | NDTIKSLAEKIRKIKELEQGQKLRQMADVIRELRRKTPAYLDQLPAGKPEGRESIWEK |
| | TPTGETLTLRQLLKSANVPGESWRAFCEELGEQLYRLEKNLYSHARPLPRLLGETEFY |
| | GQPARKSDDPPMIRASYRAFPSYVWVLDGILRAETPFYFGTETSEGQTSQAIILCPDGS |
| | YRLPRSLLRGVIRRDLRAILGTGCNVSLGKVRPCSCPVCEIMRRITVQQGVSSYREPAE |
| | VRQRIRSNPHTGTVEEGALFDLETGPQGMTFPFRLYFRTRSPYIDRALWLTINHWQEG |
| | KAIFGGDIGVGMGRFRLENLQIRSADLVSRRDFSLYLRARGLKGLSREEVTRIGLNEE |
| | QWEAVMADDPGTHYNPFPWEKISYTLLIHSPLISNDPIAAMLDHDNKDAVMVQKTVL |
| | FVDESGNYSQMPHHFLKGSGIRGACRFLLGRKDAPNENGLTYFEADHEECDCLLCSL |
| | FGSKHYQGKLRFEDAELQDEVEAIKCDHVAIDRFHGGTVHRMKYDDYPLPGSPNRPL |
| | RIKGNIWVKRDLSDTEKEAVKDVLTELRDGLIPLGANGGAGYGRIQRLMIDDGPGWL |
| | ALPERKEDERPQPSFSPVSLGPVHVNLKSGSDTADVYYYHPHYFLEPPSQTVSRELDII |
| | SHARTRDSGGEALLTGRILCRLITRGPIFIPDTNNDNAFGLEGGIGHKNYRFFRINDELA |
| | IPGSELRGMVSSVYEALTNSCFRIMEEGRYLSRRMGADEFKDFHPGIVVDGAKIREMK |
| | RYRLPLYDTPDKTSRTKEMTCPELFTRKDGRPERAKKFNEEIAKVAVQNRAYLLSLD |
| | EKERREVLLGNREVTFDECPDDEYSDDEYSELKYAQKYKDFIAVLKKNGQKRGYIKF |
| | TGPNTANKKNEDAPDKNYRSDWDPFKLNILLESDPECRVSNIHCYPRPLLVCIKDKAE |
| | YRIHKRCEAIFCSIGSPSDLYDIPQKVSNQYRTILQDYNDNTGKIVEIFRTQIKHDQLTT |
| | GDLVYFKPAANGQVNAVIPVSISRKTDENPLAKRFKNDSLRPCAGLCVEDCNECPAR |
| | CKKVADYFNPHPRGLCPACHLFGTTFYKGRVRFGFAWLTGEDGAPRWYKGPDPCDS |
| | GKGRPMTIPLLERPRPTWSIPDNSFDIPGRKFYVHHPYSVDGIDGETRTPNNRTIEPLAE |
| | GNEFVFDIDFENLRDWELGLLLYSLELEDSLAHKLGLGKPLGFGTVQINIRGISLKNGS |
| | KGWDTKTGDDKNQWIKKGFAHLGIDIKEANERPYIKQLRELLWVPTGDNLPHVRYPE |
| | LESKTKDVPGYTSLLKEKDLADRVSLLKAPWKPWKPWSGTAPHPDKGTNRLRASIVE |
| | RDRIQRKTDTAKPEKKEETKVGKSSSSDIEKRYVGTVKWFNDKKGYGFILYGTDEEIF |
| | VHRSGVADNSIPKEGQKVGFRIERGARGSHAVEVKAIE |
| SEQ ID NO: 20 | MPRFQLSLTFFDEPFRLIEWTDKSNRNSANTQWMRGQGFARWHKITLEKGFPFVTGT |
| SESD01000293.1 | AVRSKIIREVEALLSRNKGTWNGIPCCSGFFDTKGPSPTHLRYRPTLEWEYGKTVCTSE |
| | ADVCPLCLLLGRFDQAGKKSDTPCQSTDYHVHWENLSAGVAQYRLEDIAQKRTSNR |
| | VDFFSKKAHDHYGVWEVTAVKNLLGYIYISDAITESHQKTVISLLKAALSFTDTLCGA |
| | NCKLELSDEPVDSIHSNQSASNFNPHSGAAPSQCSQSMPPFNMDQETKELANTLCKAF |
| | TGNMRHLRTLADAVREMRRMSPGISSLPRGRLNKEGEITAHYLWDERIDEKTIRQVLE |
| | DTIELSPARSIIYKNWISFCNQLGQKLYERAKDNDPILERKRPLGEAAFSKVPTSSHAPR |
| | HDMNSRVKGGFTREWIIVGTLRALTPFYMGTGSQAGKQTSMPTLQDSNDHFRLPRTA |
| | LRGALRRDINQASDGMGCVVELGPHNLCSCPVCQVLRQIRLLDTKSKFSMPPAIRQKI |
| | CKNPVLSIVNEGSLFDVELGIEGETFPFVMRYRGGAKIPDTIITVLSWWKNERLFIGGE |
| | SGTGRGRFVLECPRIFCWDVEKGQNDYIQYHGFRNKEDELLSVYSTVSGLAEKNDVN |
| | LNNARDFSFDKICWEVQFDGPVLTGDPLAALFHGNTDSVFYKKPILKSGEKEPSYQW |
| | AIKSDTVRGLIRSAFGKRDALLIKSHEDCDCLLCEAFGSKHHEGKLRFEDLTPKSDEIK |
| | TYRMDHVAIDRISGGAVDQCKYDDEPLVGTSKHPLVFKGMFWINRDSSVEMQRALIA |
| | AFKEIRDGLYPLGSNGGTGYGWISHLAITNGPDWLNLEEVPLPQPTADIPVEECTAEPY |
| | PKFQKPDLDQNAVYYPHYFLQPGKPAERERHPVSHDHIDDKLLTGRLVCTLTTKTPLI |
| | IPDTQTNTMLPPNDAPEGHKSFRFFRIDDEVLIPGSEIRGMVSTVFEALTGSCFRVINQK |
| | AHLSWRINADMAKHYRPGRIIQNNEKMFIQPYKMFRLPFYAGFDPRNCLSEKQLLGIE |
| | PVKLWVKDFVASLVKPQTDIDIEWKEKIGFVRVTGPNKVEVDSSNTPDPSLPECESDW |
| | KDIHITEDGSTPSKNDRVYRCQLKGVTYTVAKWCEAFWVKDEGKKPITVNAEAINRY |
| | HLIMKSYQDNPQSPPIIFRSLPVLNYKQDQKIIGSMIFYRESAKSDKIVNEIIPVKISRTA |
| | DTELLAKHLPNNDFLPCAATCLNECDTCNAKTCKFLPLYREGYPVNGLCPSCHLFGTT |
| | GYQGRVRFGFAKMNGNAKFCQGGERPEDRAVTLPLQERPKLTWVMPNENSTIPGRK |
| | FFLHHQGWKKIVDEGKNPINGDVIEPDANNRTVEPLAAGNDFSFEVFFENLREWELGL |
| | LRYTLELESELAHKLGMGKAFGFGSVKIKIKSVDLRKQGEWEKATNTLVSEDKKSSW |
| | YNIHTVNNLRTALYYVEDDKIQVNYPKLKKDNESDNRPGYVEMKKTAFPVRDILTTP |
| | WWPWWPPTPPPMNQSGNQSYARSEEPARITESQPEVYKTGTVKFYKHDKKFGFITM |
| | DGRENIHFAGNQICRPETSLQSGDKVKFIEGENYKGPTALKVERLKG |
| SEQ ID NO: 21 | MRLKINIHFLEPFRLIEWHEQDRRNKGNSRWQRGQSFARWHRRKDNDQGRPYITGTL |
| OBJA01001127 | LRSVVIRAVEEELARPDTAWQSCGGLFITPDGQTKPQHLRHRATVRARQTAKDKCAD |
| | RQSACPFCLLLGRFDQVGKDGDKKGEGLRFDVRFSNLDLPKDFSPRDFDGPQEIGSRR |
| | TINRVDDETGKAHDFFSIWEVDAVREFQGEIVLAADLPSRDQVESLLHHALGFVDRLC |
| | GARCVISIADQKPAEREERTVAAGDEKATIADYDQVKGLPYTRLRPLADAVRNLRQL |
| | DLAELNKPDGKFLPPGRVNKDGRRVPHYVWDIPLGKGDTLRKRLEFLAASCEGDQA |
| | KWRNICESEGQALYEKSKKLKDSPAAPGRHLGAAEQVRPPQPPVSYSEESINSDLPLA |
| | EWIITGTLRAETPFAIGMDAPIDDDQTSSRTLVDRDGRYRLPRSTLRGILRRDLSLASG |
| | DQGCQVRLGPERPCTCPVCLILRQVVIADTVSETTVPADIRQRIRRNPITGTAADGGLF |
| | DTERGPKGAGFPFSLRYRGHAPMPKALRTVLQWWSAGKCFAGSDGGVGCGRFALD |
| | NLEVYRWDLGTFAFRQAYSENNGLRSPEEEFDLAVIHELAEGLAKEDGQKILKGTEPF |
| | TCWQERSWQFSFTGPLLQGDPLAALNSDTADIISFRRTVVDNGEVLREPVLRGEGLRG |
| | LLRTAVGRVAGDDLLTRSHQDCKCEICQLFGSEHRAGILRFEDLPPVSPTTVADKRLD |
| | HVAIDRFDQSVVEKYDDRPLVGSPKQPLVFKGCFWVQTSGMTHQLTELLAQAWRDI |
| | AAGHYPVGGKGGIGYGWINSLVVDGEKITCRPDGDSISLTTVTGDIPPRPALTPPAGAI |
| | YYPHYFLPPNPEHKPKRSDKIIGHHTFATDPDSFTGRITCKLEVVTPLIVPDTEGEQPKD |
| | QHKNFPFFKINDEIMLPGAPLWAAVSQVYEALTNSCFRVMKQKRFLSWRMEAEDYK |
| | DFYPGRVLDGGKQIKKMGDKAIRMPLYDDSTATGSIKDDQLISDCCPKSDEKLQKAL |
| | ATNQKIALAAKHNQEYLAQLSPDEREEALQGLKKVSFWTESLANNEAPPFLIAKLGEE |
| | RGKPKRAGYLKITGPNNANIANTNNPDDGGYIPSWKDQFDYSFRLLGPPRCLPNTKG |
| | NREYPRPGFTCVIDGKEYSLTKRCERIFEDISGGENQVVRAVTERVREQYREILASYRA |
| | NAAGIAEGFRTRMYDTEELRENDLVYFKTAKQADGKERVVAISPVCISREADDRPLG |
| | KRLPAGFQPCSHVCLEDCNTCSAKNCPVPLYREGWPVNGLCPACRLFGAQMYKGRV |
| | NFGFARLPDDKQPETKTLTLPLLERPRPTWVLPKSVKGSNTEDATIPGRKFYLRHDGW |
| | RIVMAGTNPITGESIEKTANNATVEAIMPGATFTFDIVCENLDQQELGLLLYSLELEEG |
| | MSHTLGRGKPLGFGNVRIKVEKIEKRLSDGSRREMIPPKGAGLFMTDKVQDALRGLT |
| | EGGDWHQRPHISGLRRLLTRYPEIKARYPKLSQGEDKEPGYIELKSQKDENGVPIYNP |
| | NRELRVSENGPLPWFLLAKK |
| SEQ ID NO: 22 | MSNQTRWIIEGTLELITPLHIGTGLDEKERDENKETRWLEAVALDHKGQPYIPGASLK |
| OBEQ011807420 | GALRALAKRHDFRNLFDNKEVDGDFVRQAEFLSAWCVPDTDKGRLIQPRVAIDRVT |
| | GTAQDKKLFQTRLITPGTRFAMKIVVQNAVENEIADLLGLLNLLPDDPQFSLGAYANQ |
| | GQGRVQWFGKIQTRCFGINEAKAWYEEIRKDESKCWTAFAKPKNVSTPPTPAKEAQL |
| | TLPLNLAFHTPFLVKQAGIKADDADAVPRRTHDDKIVLPASSLRGRLRTQSERILRTLG |
| | CETPQGHTAPAYRKGQPHDDLAVLLFGAAGWRGIVQTSDCIVEDKSIKTRRHEMLAI |
| | DRFTGGGKDGAKFNVDYVECPTLAGKLSLDLARLKNAKLKGGKDALLPALGLMTL |
| | MLRDLAEGDIPFGYGISKGYGQCRASSALGDWAELLKQHLGADSADTTVQALREYL |
| | GNPKGQELKLDPPSADATQAGVPAQQNAAKTQAQGAQEKFHNPYHFIPLSKPDISQW |
| | PEPQKLTEKGHSHDRYASLSGRIVCRLTTQTPLFIGSEQTTPTNPQAPKSLHPFKLNNG |
| | LAIPATSLRGMISSLFESVSNSNFRVLDEKTYSMRKTMQQSLSAMGRIVRHDQKLYLL |
| | PLTLPTLPQGPHGVYDLGEKWSAVFDWQPPPLRIYFDPPPRRTYQSQQPCYMKLSTV |
| | KYSESNPNQIIAGENLGALRFPRGNQNTQFLIGQSNQDECPITQAEYAQKSEDERNEYT |
| | SGWVRTLVKPGRDLPRSVKHHVFLPDVFIDAPPPVNDLYPIPDSVIQRFHDLADQVLA |
| | SMNLKPEEIVDSTNLLPYTPVGRRSDSDCRDTRLQAGDLIFFDIDPPLHPGEKSQITEISF |
| | SSIWRSGIGKDHLLTTPDLLTNFDVNLQPHGMPGRTQSLSPAELLFGLVGTQNDQATT |
| | AYAGKVRIGFGLPEEGHNPRLDARITLKELSSPKPPSPALYFRKKSGKDEYVSKANLA |
| | DKPEDYILRGRKMYLHAWRKNEQVVELSDTGHDGGVRPPWVSKFDESADEGNKRR |
| | VSIEPIAKDESFYFENDFHNLSRTELAQLCATLYPNEKFEHRLGMGKPLGLGSIKITPLS |
| | LFLVNRSQRYATDGLDKPRYHAVWHTGTASEPRWPDHLQREQQGIAFEGVSTAPTV |
| | MSLAAEAKVSDDVKRALELLGNPDEITVPVHYPQLHNGLMESKQFDWFVQNDKSGR |
| | DQPANNRQHLSSFTKDTEKLEPLIRIMRR |
| SEQ ID NO: 23 | MTTPSAPKSSLPALHWLIRAELEVLTPLHLGTGTDQRITPDAPDADPYWQADIALDAD |
| OVOO01000106 | GRPYLPGASLKGALKALARRRQVDAPCLPLFGDLNRGGAPHPDCIPPRRTRAGLAEFR |
| | DALQSHATQADGPDTAQPRIAIDRITGSVVDKKLFHTQTVPVGTRFSVEIILRRADQNL |
| | AAQLVALLQHGPTDPDFRLGAHANLGFGRVGLYGNIDTRRFGPQQAQHWFAAAQTQ |
| | ADARWTDFAEAVTLTAPAPAPAQPAPHRLALPLSLTFHTPFLVKQPEHKHRKPQDNA |
| | PDGTPRQRGDRALLPGASLRGRLRSQAERILRTLGCKVAQGHAVPPVKNNTCPDPAT |
| | LLFGTAGWRGLLRTDDCTGTAPATLVDHDMLAIDRFTGGGKDGAKFKLRYAECPTL |
| | EGQLSLDLSRLRSARLDGANAADTPWIALGLLTLVLRDLAEGDIPFGHGSAKGYGRC |
| | RAQGLPDRWRQALEAHFGPNADARALAALRAWCRTHATAALDAPCSLAGSAPTPA |
| | AAAPSGQAAPADAFHNPYHFIPFSQPDIDRWLSPDAHRKTGGHSRYRGLSGRLVCAL |
| | TTVTPLFVGAAARTPASDQHPKPVAGFALQNQPAIPATSLRGLLSSLFESISGSNLRVL |
| | HPTPYSIRKTTKEALSAIGRIVERNGELKLYPLTLPTIHQNADNAYPVPARWRKVFYW |
| | ESPVPLRVYFGSRKQTYDSRQPHYLPIQELSYLPNDSDCIAPDQGDLRFPSRDRDRKFL |
| | IGQCPISRYDCPIPETDLPKLSPQERPRYTRGWVRSLWTSNREKELPHTVKHQLFIPDP |
| | VETPAADDLLPIPQGVLDTFHALADLALAGQHWGKDETPADDQLLPFTPAGRQRHD |
| | ADRPPRDADRQTRLQPGDLVCFDLGDDGAVSEISFSSIWREGLRLAGKPNLATTADLL |
| | AQVSPHLLPLGMPGRSARLSPVEQLFGVVEYRPPQTAKGTRKPTDAPAAYALAGKLQ |
| | VGFGRPARPFEREPAVTLKELSTPKPPSPALYFRPKAGDGYVSKAKLASQPQDYAPAG |
| | RKHYLHALRRQGQVARLDNSGHVPSDGSGRPPWQSRFDGQEDSGNKRRVRVEPIPA |
| | GETFHFEIDFDNLSPTELEQLCATLLPHPAFEHRLGMGKPIGLGSVKLAVEGLLLVDRP |
| | RRYAEDEPNAPRHHRGWRANADAGWPDHLQGDSPAAPLEATEQPAALAERAMARV |
| | PADVRRALQLLGNPGAVAAPVHYPQVKDAQIEEKHYLWFVANDDEKTAGGNRHLP |
| | RLHANSPGLPTLPRLVKREKDHSSNTGKPRRK |
| SEQ ID NO: 24 | MIPDLRSLVVHISFLTPYRQAPWFPPEKRRNNNRDWLRMQSYARWHKVAPEEGHPFI |
| PDWI01005922.1 | TGTLLRSRVIRAVEEELCLANGIWRGVACCPGEFNSQAKKKPKHLRRRTTLQWYPEG |
| | AKSCSKQDGRENACPFCLLLDRFGGEKSEEGRKKNNDYDVHFSNLNPFYPGSSPKVW |
| | SGPEEIGRLRTLNRIDRLTTKAQDFFRIYEVDQVRDFFGTITLAGDLPRKVDVEFLLRR |
| | GLGFVSTLCGAQCEIKVVDLKKKQNNKEDSILPVSEVPFFLEPEVLAKMCQDVFPSGK |
| | LRMLADVILRLREEGPDNLTLPMGSQGLGGRLPHHLWDVPLVSKDRETQTLRSCLEK |
| | IAAQCKSEQTQFRLFCQKLGSSLFRINKGVYLAPNSKISPEPCLDPSKTIRTKGPVPGKQ |
| | KHRFSLLPPFEWIITGTLKAQTPFFIPDEQGSHDHTSRKILLTRDFYYRLPRSLLRGIIRR |
| | DLHEATDKGGCRVELAPDVPCTCQVCRLLGRMLLADTTSTTKVAPDMRHRVGVDRS |
| | CGIVRDGALFDTEYGIEGVCFPLEIRYRGNKDLEGPIRQLLSWWQQGLLFLGGDFGIG |
| | KGRFRLENMKIHRWDLRDESARADYVQKCGLRRGVGDDTAINLEKDLSLNLPESGY |
| | PWKKHAWKLSFQVPLLTADPIMAQTRHEEDSVYFQKRIFTSDGRVVLVPALRGEGLR |
| | GLLRTAVSRAYGISLINDEHEDCDCPLCKIFGNEHHAGMLRFDDMVPVGTWNDKKID |
| | HVSCSRFDASVVNKFDDRSLVGSPDSPLHEEGTFWLHRDFQNDVEIKTALQDFADGL |
| | YSIGGKGGIGYGWLFDMEIPRSLRKLNSGFREASSIQDALLDSAKEIPLSAPLTFTPVKG |
| | AVYNPYYYLPFPAEKPERCLVPPSHARLQSDRYTGCLTCELETVSPLLLPDTCREKDG |
| | NYKEYPSFRLNNTPMIPGAGLRAAVSQVYEVLTNSCIRIMDQGQTLSWRMSTSEHKD |
| | YQPGKITDNGRKIQPMGKQAIRLPLYDEVIHHVSTPGDTDDLEKLKAIVLELTRPWKE |
| | LPEEQKKKRFEKCKNILDGRMLQQKELRALENSGFAYWRDKTSLTFDSFLKDAIEQE |
| | YPRYSGDYQRIKALVVNITLPWKLLKKEERHKRFDKCRRILKGQQPLTKDERKALEES |
| | GFANWHGRELLFDRFLKDENSCLIKAETTDRVIASVAKNNRDYLFEIKQQDFARYKRI |
| | IQGLERVPFSLRSLAKSKETSFQIACLGLRRGRFLRKGYLKISGPNNANVEISGGSHSNS |
| | GYSDIWDDPLDFSFRLSGKSELRPNTQKTREYPRPSFTCTVDGKQYTVNKRCERVFED |
| | SAAPAIELPRMVREGYKGILTDYEQNAKHIPQGFQTRFSSYRELNDGDLVYYKTDSQG |
| | RVTDLAPVCLSRLADDRPLGKRLPEEYRPCAHVCLEECDPCTGKDCPVPIYREGYPAR |
| | GFCPACQLFGTQMYKGRVRFSFGVPVNSTRSPQLKYVTLPSQERPRPTWVLPESCKG |
| | KEKDVPGRKFYLRHDGWREMWGDDDKPDSRPSSEECQDIIEGIGPGEKFHFRVAFEN |
| | LDKNELGRLLYSLELDAGMNHHLGRGKAFGFGQVKIRVTKLERRLEPGQWRSEKICT |
| | DLPVTSSELVISSLKKVEERRKLLRLVMTPYKGLTACYPGLERENGRPGYTDLKMLAT |
| | YDPYRELVVQIGSNQPLRPWYEPGKSFKPSPGNDCTGRGGSVSKSLISEPKVVPAIAPF |
| | CEGVVKWFNSVKGFGFIETKEQRDIFVHFSAIRGEGYKILEPGEKVRFEIGEGRKGPQA |
| | INVIRIR |
| SEQ ID NO: 25 | MKMNKTWPFREHWEISGYLRTVTPLHIGSGRTVTRPELTVADRDELVDINAVVTDYT |
| VAPF01001339.1 | GKPYLPGSTIKGALHAWLQKRLKEESRTCLIQLFGQEEEAEEKKKNNHGGKAEFFDA |
| | RVIFPHTGPGSLPYWDDCRQTYVAATVAIDNITRTARHRHLIHAEMVPPGVTFALTLA |
| | GPLDEEDIGLLLAALQGFNESPPALVIGAHTANGLGRFSWELSTVRRFGKEHLQGWLE |
| | AETRAMRTEAMQPLSREGVEDLLQDGIAQIDHNEDQVRLGLELCFDGPFLVNDPPTK |
| | KEQDDKKKRRSNTPNLRPLRDAIGRPCLPESSVRGALRAQAERIIRTMEGTCSEDNPA |
| | YKKEIHTDAEIEELSAVCRVFGAPGWKSLLEISDFEFVDGEDCDNIQEFVAIDRFTGGA |
| | KDKAKFNAEYIGSPRFTGTIALDKRRDLPDWGKGLLYLVLRDLAEGDITLGFGRSKG |
| | YGVCRAKIKNLDLLLPEKSVAALHKKFAISPADDKPATDQIAEDTTSGNLGISAGGPA |
| | QKTTESYEPPNPSGPGTFHNPYHFVPVVKPSAADRQHWLDKGILPSASENKTQHTHA |
| | CYLDTTNGKKIYHGRIVCRLQAETPMFIGGRHRENTEPTEILPFTLGGKPAIPATSLRG |
| | MLSSIAEAASNSSLRVLEDKTLSYRKSMRANRNEDKPLSALGMIKKIETGDKVEYRLL |
| | PLTLPTLVKRGQYYILPEEYQTMFPDGRAKLKVYLNSNYTASDGTNQDFLKGKKSWR |
| | LPHGEIYYMKLCQDFSLQNGQLTFDSQNQNMLHFPKNRNNFVVGQRSIDNTPPMTKA |
| | EWRTNHQTGVPGMLRIMQASGRNFPTGRYHEIFIPVPTKKDCKQLYPVDEKAVERFL |
| | DLAGEQTKSQQNEKNLKQYQILPYHPVGTKRNTDPETNDRYMDLNSGDIVYFRPDAT |
| | GTKVEEISFSSIWRDRVEDDNHNRAGVHAFFGNIDKELLPFNPKRAEISPAELLFGFVE |
| | ERERGKVDDGQAPAFAGKVRVSFGRLSSEKKPDTIFQDQVTLKALSSPKPPSPALYFT |
| | GNGNGSIAKPDLTLSRHSPQGRKFYLHAWQEENEIIKFLSNGKKTSPTVINGLYPWES |
| | KSNLSRQLPDKHAKLKSAITPIKKGTVFYFHVDFDNLSEWELGLLCYALQPGKEFRHK |
| | LGMGKPIGLGSIHIEPAGLYLVHRGNRYSLDGVPDNSRYNGGIWQSEDKRLQEWQEL |
| | YPRESTAAASSAAASPADFALKFSGTMTPSVQQALKRLGDPDNVVAPVHYPQVEGA |
| | DLEEETYKWFVANDVGSQTKVGNRTTCTEEAARKSMLPLAGRGPLPRLKRYKWCP |
| SEQ ID NO: 26 | MAAVQDRWTLMDQQGNELKRFRITAELETASSLHIGASETVEHDLIKNDDGTPVQIN |
| DRKI01000155.1 | ALITGAGGLPIIPGSTIKGRFLARLRERGVDSALLETLFGKGHDRETEDQGRGGRAEFH |
| | DAPLCHRLSGARHFPYWRPERQIWVKAQTAVDRHRGTALRRSLRYTEMVPPGVRFR |
| | LTITGCMTDAEADVLFALLEDLGDPRQACSFGGAGADGNGTMRLFGRPEVYCLDRS |
| | GILGWLASFEKGGNGGMAMTAAALLQADTVQRRADKVRQAWQPPDVGPRLHVELR |
| | FSGPFLVNDPSRNTPDITQAPDMVPLVDEDGNPMLPASSFRGALRAQAERIIRTLGGRC |
| | CDTSSPCRPLGSSDKVGELCLACQVFGAPGWGTTLHIQGFTCTSVFRREQEQTFVAID |
| | RFHGGCKEGALYTIRHAESPREEGHLVIDPRMPAWGRGLLALVFRDLREGDITFGLGA |
| | GKGYGVVDAAVVQDMAELEPYVEAFREQCRQHQGMADCHSAPSPQPLRDHDLAEIP |
| | PAEEAPGETFLNPYHFVPIREPDTGSWLARDELDSSCCHSHGFYRQQVDDRPLYHGRL |
| | TCLLETETPLFIGATGDSSVPSRIENYRLGNRIAIPAASLRGMLSSLAEAASNSAMRVL |
| | HQGILSYRKKAKNALREIGMIVLRDGKRFILPLVPLMEVTKLRHAYTDPAMKHFLDD |
| | KNSWSPRCNRVYYLGRDGNQIPAETRGAGMRPGILRLLGREGRHDALQNKKHEYFIE |
| | IPERYVDQDHCFDYRMFIRDRARNGTLVPISPVAWERYHCLAEERTLSQKNDPELRED |
| | KACASLKWLPFHPKGRVRERDPENDVCHLSLRHGDLVFYAEQNRVVSEISFSAIWRS |
| | RVETSDSYQAVTVDCFVPKELRPFNRDRRAISPAELLFGFVELDESEHSTEKSRYEQM |
| | AFAGKVRLSAGLPVEDVEDSALLEPKPIVLKALSSPKPPSPPFYFVMRDGSGAYIAKK |
| | DLSPDRHRIKGRKHYLHGLRQRGNPDRVQSLDRYGHATETAANPPWETCHPEERPQI |
| | KVRVQPVRRKTKFFFHLDFSNLSRWELGLLCYVLRPTACFRHKLGMGKPLGLGSVRI |
| | DIASLQLIDRVRRYGTDDLTAGRYNMGGHFNASCLDLLPQQDSPAPDDSGAAPDPGT |
| | LRQDFVKTMDETVFRALDLLGNPAHVQRPVHYPQVREMDIEDQTFLWFVDNDKQW |
| | KDALQPLTSSSTQLPPLTRRNKR |
| SEQ ID NO: 27 | MTTVKEKSWAFTGLKRWKIITTLETQTPLHIGSGEVAEIEINDSQGDRRQVQANAIIRG |
| DRNY01000543.1 | KDDKPIIPGSTLKGKLRSHFESCLDHSKALERVFGKEYQSDEEQGRGGLAEFHDAVCS |
| | YVAPGNSYYPNWNEARNTYIEASTTIDCHTGTAADATLHYNECVPPGTRFLVTVTGA |
| | MSDKDAALIVAALQAFGDETNPIHLGAEEANGKGRMGLFGNVEVSCLDHDDIIAWIS |
| | QGSDARMATDKFKPLGKEKVNDLAKNITTPTATGGAQRQHFGIELKFDGPFLVNDPS |
| | KYSKGDGDQPAVHQPLTDRSNNPILPARSFRGAIRAQAERIIRTMGGACCDTQSPCQN |
| | SGQLCIACQMFGTTGWKTTLSISDFTYDGEYRPAKTQQFVAIDRFHGGGKDGALFSIK |
| | YFERPVLKGGISLKLRNQNADELSWRKGLLALLFRDLQEGDITFGFGANKGYGGVEE |
| | ACITNADVISTADIEAFRAKCHANHADSWCSPVSKPTNRDDKSSLPSINPATGAGHAF |
| | HNPYHFIPIKAPDTSTWLDKHKLATPGSPHSHAYYRSCSDDDKPLHHGRITCKLTAET |
| | PLFVGSGDAENQLTDSEAKLKEHYQLNNKLAIPATSLRGLISSLAEAASNSALRVLDN |
| | GVLSYRKPASRALRKIGILFKREEQWRLVQMEGNLANAIKLKSAYTNQKMMDFLAN |
| | KQSWSPEHNVVYYLSADFRPGDVPQETYLAGRICGILRILGGKDGDRKNELENKKHE |
| | LFIRVDEQYVDTEINRFDYEEYVRQGGIPVSPSAVERYTELADQRSLSQKNSRDLKGD |
| | NNCCSDKWLPFHLKGAARYKKEKACLLPLREYDLVYFDSDGTQVTEISFSAIWRDRV |
| | ADKVHAFFPEELRPFNQKRKWISPAELLFGFVELNDNKDERDHAQAFTGKVRVAAG |
| | VLSPDDSIRQGDLQEHEPIMLKALSSPKLPSPALYFKQKSGDHRYIAKPDLKKASHQA |
| | QGRKIYLHALRDQKDDVQKLNTKGQPANGNGAHLPWKTADEDERPQLKVRIRPLKP |
| | GTSFYFHLDYNNLTEWELGLLCYVLQPSETFRHKLGMGKPIGLGTVKIEIATLQTIDR |
| | QKRYREAGANEHRHNGSNWVNESLRDELERLPGTVELSPDRQPEAKLRPDELRQSFI |
| | ATMDNDIYRAIELLGDPHNIKYPVHYPQVRNKSIEQENFKWFVANDSGSGDQRKGTG |
| | IDAKEEPMRSIDQISTTIPTLNRYEWNGD |
| SEQ ID NO: 28 | MARNNKQYHFIPRWEIKVNLTTRSFLHIGCDEFTDRPGLEIEQKDGSKVKAEINAFIKD |
| DTXS01000070.1 | SNGKPYLPGSTIKGNIRKWLETNKKADEETCKLFNTLLGFTVKMQDEGCGGSAEFHN |
| | AVISSPLEDGNNFPYWDVDLQTSVETSTVIDRVTGTWDGRLFSTEVVPPEVSFTLIITG |
| | AMTEQQVSLLTAVIKDGFAEDCPTPITIGADSGNGFGRFRFDSIHMKCLGTGEVLNWL |
| | EDGSQDMAATAMRSLSPDDIEQHIIKGRNYLKSPSVSDTVTIEFGFAGPFLVNDPSRKK |
| | RKEDEDHQPLRDSAGNARLPAKSIRGAMRSQAEKIIRTLGGWCCDPVNPCPSVFSVVEI |
| | NDRLCLACRVFGATGWKSRISIQKVEYKGTAESTRQETVQDFVAIDRFHGGGKETAK |
| | FDASFSWRPQYSILMHIPSDLEGWAKGLLALTFRDFKEGDIFLGYGRSKGYGRVDSDS |
| | VKPGIDTMLTESNLELFRRKCDDNPGEYPCKTRQPPNLVQPVERNNLTEAADEGSFH |
| | NPYHFIPTPKPMIESWLAKEDFDETMHDSHALYRDVDENEEPLYHGKISCTLTTETPV |
| | FVGGKHDPRNDTEPQQVDHYTENGEIAIPATTLRGLLSSLSEAASNSSMRVLDDGMM |
| | SYRQPVGSGSLSAIGMWIRDGKKFIYPLALPIFGERDKLPQEYHIMFPYTQKAPLKVY |
| | LERAYLAGNMKSFLDKQNSWNLLNEKIFYLPVPEFSFSRVHTMGAENRDVLKISRRG |
| | NLILGARLPVNLCPRSKEKALPGDIPGILRILGKEGRDGEVPVGKKHELFIPVSDGFASN |
| | PRSFIDNLTSKELFKIPDEVVDRFEELADDRTTQQIKHPGNVKNNNQWLPFHLKGCTR |
| | NDGLTGKDEKRLRVQEGDLMYFRPSPQSPQVAEISFSAVWRGRVNKTVHNYFPPELV |
| | QFNKNREKISPAELLFGFVQQDKHEKSLSFAGKWLSSGKQLRETESVSRENEVTLKIL |
| | ASPKLPSPSLYFKRENYIEGGNYIAKNEMNNSSNIKPRGRKQYLHALSNSEDPKGVQK |
| | ISRTGSVDDGGNYPWQSMNNDNIKQKVCIRPVSKDGCFTFEMEFENCTEWELGMLLY |
| | ALRPSQQYRHKIGMGKSIGLGTVRIDINNLQFIHRKNRYNAGIIDVPRYNYEAGHDMD |
| | YFHNKFADTIMPEIKNSIELLGDPRNVRFPVHYPQVHGADIEDKTYQWFVANDSGTN |
| | NGQNGAAYKKNKAEESSLTELDEISNTIPGLERHEWLGR |
| SEQ ID NO: 29 | MALKTWTLNGEERWHISVVLETVTPLHIGSGEFCYRPELTNADQKPVDINACIKGAN |
| JABFST010000317.1 | NLPIIPGSTVKGKFNAWLTARQVDTPLLEAIFGKGHNPDDDDQGSGGKVEFHDAWIST |
| | KIKDTSTWPYWQVATQTFIDAATAIDRHSRTALDASLHYTECVPPGVQFTLNITGVM |
| | QEHEAALIIAALDRFDQHDDQPYFGAGDANGQGQLILVGHLAVKVMGKTEITEWLA |
| | HFNNKASDMAMSHARSLGAEDIAGLIKLGQTLLKPVPPTVSLGIQLQFAGPFLVNDPY |
| | AVKKLEADPKTKIDHYPLLDNHKKPRLPSASIRGVLRSQAERIIRSLGVHCCDTRDPCP |
| | SLYKHQDLSQLCLACQIFGAAGWKSVINISDFTCVDANELKTQEFIAIDRFHGGGKDG |
| | AKFNAKHSERPYFQGRITLSPRMANHQLDWGKGLLALVIRDLQEGDLSFGFGANKGY |
| | GALESVLITGIDQLQTDAIEAFRRLCVTQAAPQAFITPTSAVVIGDKAPLVVTDKKLPD |
| | NSFHNPYHFIPINSPDTRHWLPTETDLAESHHSHAYYRQQPELFHGQLICRLYTETPTFI |
| | GASKKDDTLPAELDNYRLNGQLAIPATSLRGMISSLAEAASNSAMRVLDNGLLSYRK |
| | DASLALSKIGITFINRQGQWQLIPMEKIKLKNAYSAENMRLFVEQSHSWSPDYNTVYY |
| | FSEKAGAFDVPQRTPKPGWQPGILRLLGKEGRSQELENKKHEWFIPVPENYIDKQLNA |
| | FKYQEYLKDNSSKAIDIPAPVLNRYNELAYQRTLSQKKDTELVADGDSPAWLPFHLK |
| | GQQRQPQMVGKHLVYTLPMTEYSLVYYAATNKVATEISYSSIWRGRVQDDADQAAT |
| | VNHFIPDDLLPFNPKRTSLSPAELLFGFTELDPDKHSNDPTRSFAGKVRIGAATLAAYP |
| | SNDSDLLAPEHITLKALSSPKLPSPALYFRTLQGNNSNVYIPKHELNPNHHTAKGRKY |
| | YLHATRTPDQKRILKLSDQGHPPQNNAVKLPWLSHQETKNLQLKVKIKPIKPKQSFYF |
| | QVDFNNLTAWELGLLCYALRPTIDFRHRIGMGKPLGLGSVKIDILALQTLDRQKRYA |
| | QDSQDSARYNQHRWVNSSVTDMLAQAGYDVIEPTANPLVPKDLKTLFSQTMAANID |
| | RALTLLGEPQHVKQPVHYPQVRDTAIQVRDTAIEEESYQWFVANDNLSDNSSAAKQT |
| | LHDITETSEGLPTLIRHQKKKETQP |
| SEQ ID NO: 30 | MSDTQKQAIHENKWHFRGIKRWEISAYLKTLSPLHIGDGGTIPVTIKDTQGKNREVEV |
| PDPY01000001.1 | NSVITGKAALPIIPGSTIKGRLRHYFSKHFSDKALLNKVFGEESDATDDDQGRGGLAEF |
| | HDAKWNPEKNRNLQGRYPYWNNTRKTYIEVSTAINRHTGAAKDKSLHHTECVPPGT |
| | VFEIKITGSMDDRCAALVVAALEAIQTTGSRIFLGAEDANGNGRIGLTGKITVKQMDQ |
| | AHIIQWLQKDSTTCVASFSNVKAENETQVKQMVQRHIAPKLNSVVSAAGPSYDITLHF |
| | DGPFVVNDSDKCKAEDTPDIYPLEEKNGVPAFPVRSFRGAIRSQAERIIRTIGGQCCDG |
| | SINNTCKNPKNLCIACEMFGSTGWKTSIEMDPFLCVDRELKPFIIQEFVAIDRFHGGGK |
| | DEAKFNAAHYQAPVFKGKVRVSQRVGNDISWRKGLLALIFRDLKEGDIYFGFGTNKG |
| | YGAVKKAEINPDGNASDFSESDIEAFINKCREKKGLYNCNPIKKPGKTKVSKNLPPAIV |
| | PLDRTDSKFYNPYHFIPVKKPNTSSWAEKTAFGTADSPHSHGFYRKQTNEQQPLYSGR |
| | LICMLTSETPFFIGAQAESDPTENENQASLRHPYQLDGEPAIPSTSLRGLISTMTEAAAN |
| | CAMRVLDSEIISYRKPMNPSHILSALGMVTKRGEDFWLIPLAMPALSLNDEEHNYKLD |
| | KRYRTMFPDGLAKLKVYLEKAYSNNVMKTFLNNENTWTLAQSKIHYLPLTPIQMQN |
| | GGINSYYNNLRTPSRSNNFLIGQTVAHGNGIPASGPGAGMVPGILRILGKEHRQNDLP |
| | QNKKHELFIPVPDAFVADPKTFLDTATAFLIPRNVIDAFEKIAEKQTQSQKQDKLKHD |
| | EERLPFHLKGTRREQNHTLQIKTGDLVYFRPNAKGDEVEEIAFSSIWRGKTSGTTADFF |
| | PDKELLPFNRNRSRVSPAELLFGFTENNPKEMKIDRGLAFAGKIRISAGTLSDKFSDTT |
| | ESDLFEPETTLKALSSPKPPSPALYFKEKKSGTQYIKKQDLNPGKHEIQGRKIYLHALR |
| | NENNQNVQRITSQGKFDNAANRTQPWVSQNEERNHLKTKCKPLKSGLNFFFHIDFNN |
| | LTQWELGLLCYALRPCETFRHKIGMGKPIGLGTVKIDIAVLQTIDRYARYTDTTQDSE |
| | RYNQGAWISQELQNEIPNQYKGKGISNKKGMLSPEDCRKVFMETMDADIQRAIELLG |
| | DPGNVTSPVHYPQLDRKNIETKNYEWFKQNEIEQQVLKPITKNTTHLTPFARWEQG |
| SEQ ID NO: 31 | MNLPTWKLNNEKRWHISIVLTTATPLHIGSGEFCEHDDVKNNDGEPVKINACIKGSKG |
| NZ_JMLA01000001.1 | RPIIPGSTIKGKLYEWLKTRNTEENLLEKLFGKGHNSVSQDQGRGGKAEFHDAEIIEPL |
| | TGSQPWPYWREEHQAFIAASTAIDRHKQVALQQSLHYMETVPAGIRFKFTFTGVMRD |
| | EEAALLIAALDSFDKNQNQPCFGVDRANAYGRMELHGHLHVKVMGATEISSWLNSF |
| | SENDKKMAMESARNLEQQEINTLIKQGNALFKASCDEVKLGLTLKFKGPFLVNDPYA |
| | VKILSSNENAKTDHYPLLDKNRNPYLPVSSFRGVLRSQAERIIRTLGGKCCSTDDPCKP |
| | IFDKGDLSKLCLACQIFGASGWKTVINIHDFKAINKSKKTKQDFVAIDRFHGGGKDGA |
| | KFDATHFERPEFEGAISFSPRMANNDLDWGKGLLALVLRDMQEGDMTFGYGANKGY |
| | GGLESASITGIEQITSDIQAFRDKCVASPQTWLCDEAVKPANQQDKIPPAGIQVANSGF |
| | HNPYQFIPSKDPDTGHWLPVLGLNADSHHSHAFYRDQTDNGEKLYHGRLICCLNTET |
| | PIFIGADKKKDTEPAEINNYRLNGELAIPATSLRGMISSLAEAASNSAMRVLDNGLLSY |
| | RKTADDALRKVGMVIYVDNKSFIIKLNDAIKLKQTYTPGNMKDFIEKSNSWSPEHNT |
| | VYYLDNNQIPQESYMNGMKPGILRILGKEGREQELENKLHELFIPVPLEYVDTENNKF |
| | DYQAYKKAFLYRAIEIPEPVLKRYSELADQRTMSQKSNKELKKDDTCQSVGWLPFHL |
| | KGTKRQLDDKHKVGKLQIDEYDLIYYEASGKEVTEVAFSSIWRGRVETNSSQANKVY |
| | SFIPGELLPFNESRKKVSPAELLFGFTQINKDGSKADDKAQAFAGKVRISAGTISEYPES |
| | EANLLEQEVTLKALSTPKLPSPALYFRTINGNGSAYISKQELEPSKHLAKGRKYYLHA |
| | LRTGDNKVQKLGSQGETANGGDSKLPWVTHNPDERPQLKVKIKPIKAEFIFSLDFNNL |
| | TEWELGLLCYALRPTDSFRHRIGMGKPLGLGSVKIDIMALQTINRQQRYAQDGLEEN |
| | RFNRHNWVNPPHQPRLDKAGYSISLSSTPLNPEILRATFTKTMNADIYRTLELLGNPQ |
| | NVKRPVHYPQVENHNIEQENYKWFVANDQGSGKGRNKIDPAEKALKILTENSDCLPT |
| | LSRLDWRDE |
| SEQ ID NO: 32 | MNNKGSNMTDTVKSGRWIITGQFQLVTPMHIGTGLDEEMDKQSGESVDKKQNNSWI |
| NZ_FOGH01000010.1 | QAIALDLNKKPYIPGASIKGALKALARRYYCASNLNIFGDTIDTKDGDNKRKSVTVAG |
| | QAEFLNAWYAADQEDKPFDTITRVAIDRVTGTAEDRKLFNTRRVNPGVCFNYKIIIQN |
| | ACETEIQYLLDLLRKAAKDPSFSLGAGANQSQGKVRCLSSCVRYFGKQEMHDWFRAI |
| | QNGKQEHWQIFAKPSNIKYADLERPDIIANSLNLPLTLDFHTPFLVKASKKKDEAKNE |
| | ADAKPRTNHQGQVILPASSLRGRLRAQAEKILRTMGQDIPQGHAAPAYDGIAHRDLIS |
| | LLFGTAGWKGIVCASDLIHSIPEYALQFNGVRETISDLSDTVKSCIIVDLVKTSTAAEKT |
| | EEQLHIRIVDSAGSLIVHKSENSSWANDTFRDASVKDNFKARLKEIADPQDLSDALRA |
| | DIKKRAFQLATLTRHEMVAIDRFTGGGKEGAKFNVDYIECPTLTGAIYLDLHRLKQA |
| | QLKNDEDALKPALGLISLLLRDLAEGDIAFGFGANKGYGQCREHAVLDNWEERLKKI |
| | GAGLTIDGALQALRDTVALEPPAEFPPEIEKTTDDNQPEAPDFNLKPASNGFHNPYHFI |
| | PLNNPKIGDWPEAKAETLKANREGHDQYHTGKFSGRIVCSLTTQTPLFIGAETKPSTS |
| | DREPSEARPFKLNGKHAIPATSLRGMLSSLFESVSNSNFRVLHPEHYSVRKSLDDYVA |
| | LSAMGRIVDDQGELKLQPLTLPTLFGNRNNVPAKWEKIFGTPSEDDFLRIYFDDIPSKF |
| | SSNKRYFYNCKATELKDFIKSDKYFIGKRTPTVFPKSSTEKSHLESLEFIDVEKFKKAV |
| | ENLEITPGNNPYIHGWVRNLKDEFREDIPDNVKHHVFLPDTTKRVSPLEIPPHVKKRFH |
| | ELADLALAGLHLKQGETIASPYKILPYTPIGRNKLENHIHRVPNDLTCYMTRLKKGDL |
| | VFFDVDNDGQITEISFSSIWRAGIGTKNKLQTTADLLSQRDPNLVQLGMGVRTKNTDR |
| | FKLSPAERLFGVVEHRDDDNTTVENVNQPNDKAQAFAFAGKVRIGFGLPDKKTTVN |
| | GVSPVTLKELSSPKPPSPAFYLKRKNNDDFVSKKVAAECSETMTLRGRKCYLHAWRE |
| | QNGNVMKLDAIGVNSGGSTCKPPWKTHKPAANDQKEFEEDKNKFITSRQVKIAPISE |
| | NTPFYFEIDFNNLDATELAQLCATLQPAPKFEHRLGMGKPLGLGSVKIEPVGLFLINRH |
| | QRYTTDSTNCDRYHYAWLKGEHAAWDWPEYFRQNVVTADCTQTFNDTFDKLVQN |
| | GLAGTDADIKHALQLLGDPQYIGVPVHYPIAGNSTLENKHFEWFGNNDKASVLRQKA |
| | QANSKNHHYQPKQQATPEEPQYLHTITKDSKQISLLKKNKIEDIENRDQQKHRYSNHR |
| | R |
| SEQ ID NO: | MFPKGRQMRRQRLLGDAEYYGGTGREQPASIVISTDSDPDHKVYEWIITGQLKAETG |
| 632 | FFFGTKAGAGGHTDLSILLGKDGHYRVPRSVFRGALRRDLRVAFGAGCRVEVGRERP |
| MVRP01000104.1 | CECPVCKVMRQITVMDTISSYREAPEIRQRIRLNPYTGTVDKGALFDMEVGPEGIEFPF |
| | VLRFRGSKSFPSELAAVIGSWTKGTAWLGGAAATGKGRFSLLGLSIHKWNLSTAEGR |
| | KSYLAAYGLRDAADKTVKRLSIDKGGKGDVGLPAGLERDALPSSVREPLWKKLVCT |
| | VDFSSPLLLADPIAALLGVEGDERIGFDNIAYEKRRYNGETNTTESIPAVKGETFRGIVR |
| | TALGKRHGNLTRDHEDCRCRLCAVFGKEQEAGKIRFEDLMPVGAWTRKHLDHVAID |
| | RFHGGAEENMKFDTYALAASPTNPLRMKGLIWVRSDLFETGHDGPTPPYVKDIIDAL |
| | ADVKRGLYPVGGKTGSGYGWIKDVTIDGLPQGLSLPPAEERVDGVNEVPPYNYSAPP |
| | DLPSAAEGEYFFPHVFIKPYDKVDRVSRLTGHDRFRQGRITGRITCTLKTLTPLIIPDSE |
| | GIQTDATGHKMCKFFSVAGKPMIPGSEIRGMISSVYEALTNSCFRVFDEEKYLTRRVQ |
| | PKKGAKSSELVPGIIVWGQNGGLAVQQVKNAYRVPLYDDPAVTSAIPTEAQKNKER |
| | WESVPSVNLQGALDWNLTTANIARDNRTFLNSRPEEKDAILSGTKPISFELEGTNPND |
| | MLVRLVPDGVDGAHSGYLKFTGLNMVLKANKKTSRKLAPSEEDVRTLAILHNDFDS |
| | RRDWRRPPNSQRYFPRSVLRFSLERSTYTIPKRCERVFEGTCGEPYSVPSDVERQYNSII |
| | DDISKNYGRISETYLTKTANRKLTVGDLVYFIADLDKNMATHILPVFISRISDEKPLGE |
| | LLPFSGKLIPCEGEPPTILKKMAPSLLTEAWRTLISTHLEGFCPACRLFGTTSYKGRIRF |
| | GFAEHTGTPKWLREELDWARPFLTLPIQERPRPTWSVPDDKSEVPGRKFYLHHHGGN |
| | RIVESNLRNRPEVNQTKNNSSVEPISAGNTFTFDVCFENLEAWELGLLLYCLELSPKLA |
| | HKLGRAKAFGFGSVKIHVERIEERTTDGAYQDVTAVKKNGWITTGHDKLREWFHRD |
| | DWEDVDHIRNLRTVLRFPDADQEHDVRYPELKANNGVSGYVELRDKMTASERQESL |
| | RTPWYRWFPQNGTGGSGRHEQAATSQEQDTAKDESVLSATQRRQAVIDVSDPDERL |
| | SGTVESFDRQKGDGYIGCGVRQFYVRLEDIRSRTALCEGQVVTFRARKEWEGHEAYD |
| | VEIDQ |

[0287] Guide Molecules

[0288] The system may comprise a guide molecule. The guide molecule may comprise a guide sequence. In certain cases, the guide sequence may be linked to a direct repeat sequence. In some cases, the system may comprise a nucleotide sequence encoding the guide molecule. The guide molecule may form a complex with the dead Cas7-11 protein and directs the complex to bind the target RNA sequence at one or more codons encoding an amino acid that is post-translationally modified. The guide sequence may be capable of hybridizing with a target RNA sequence comprising an Adenine or Cytidine encoding said amino acid to form an RNA duplex, wherein said guide sequence comprises a non-pairing nucleotide at a position corresponding to said Adenine or Cytidine resulting in a mismatch in the RNA duplex formed. The guide sequence may comprise one or more mismatch corresponding to different adenosine sites in the target sequence. In certain cases, guide sequence may comprise multiple mismatches corresponding to different adenosine sites in the target sequence. In cases where two guide molecules are used, the guide sequence of each of the guide molecules may comprise a mismatch corresponding to a different adenosine sites in the target sequence.

[0289] In general, a CRISPR system is characterized by elements that promote the formation of a CRISPR complex at the site of a target sequence. In the context of formation of a CRISPR complex, “target sequence” refers to a sequence to which a guide sequence is designed to have complementarity, where hybridization between a target DNA sequence and a guide sequence promotes the formation of a CRISPR complex.

[0290] In certain embodiments, the target sequence should be associated with a PAM (protospacer adjacent motif) or PFS (protospacer flanking sequence or site); that is, a short sequence recognized by the CRISPR complex. Depending on the nature of the CRISPR-Cas protein, the target sequence should be selected such that its complementary sequence in the DNA duplex (also referred to herein as the non-target sequence) is upstream or downstream of the PAM. The precise sequence and length requirements for the PAM differ depending on the Cas7-11 protein used, but PAMs are typically 2-8 base pair sequences adjacent the protospacer (that is, the target sequence). Examples of the natural PAM sequences for different Cas7-11 orthologues are provided herein below and the skilled person will be able to identify further PAM sequences for use with a given Cas7-11 protein. In certain embodiments, the Cas7-11 protein has been modified to recognize a non-natural PAM, such as recognizing a PAM having a sequence or comprising a sequence YCN, YCV, AYV, TYV, RYN, RCN, TGYV, NTTN, TTN, TRTN, TYTV, TYCT, TYCN, TRTN, NTTN, TACT, TYCC, TRTC, TATV, NTTV, TTV, TSTG, TVTS, TYYS, TCYS, TBYS, TCYS, TNYS, TYYS, TNTN, TSTG, TTCC, TCCC, TATC, TGTG, TCTG, TYCV, or TCTC.

[0291] The terms “guide molecule” and “guide RNA” are used interchangeably herein to refer to RNA-based molecules that are capable of forming a complex with a CRISPR-Cas protein and comprises a guide sequence having sufficient complementarity with a target nucleic acid sequence to hybridize with the target nucleic acid sequence and direct sequence-specific binding of the complex to the target nucleic acid sequence. The guide molecule or guide RNA specifically encompasses RNA-based molecules having one or more chemically modifications (e.g., by chemical linking two ribonucleotides or by replacement of one or more ribonucleotides with one or more deoxyribonucleotides), as described herein.

[0292] As used herein, the term “guide sequence” in the context of a CRISPR-Cas system, comprises any polynucleotide sequence having sufficient complementarity with a target nucleic acid sequence to hybridize with the target nucleic acid sequence and direct sequence-specific binding of a nucleic acid-targeting complex to the target nucleic acid sequence. In the context of the present invention the target nucleic acid sequence or target sequence is the sequence comprising the target adenosine to be deaminated also referred to herein as the “target adenosine”. In some embodiments, except for the intended dA-C mismatch, the degree of complementarity, when optimally aligned using a suitable alignment algorithm, is about or more than about 50%, 60%, 75%, 80%, 85%, 90%, 95%, 97.5%, 99%, or more. Optimal alignment may be determined with the use of any suitable algorithm for aligning sequences, non-limiting example of which include the Smith-Waterman algorithm, the Needleman-Wunsch algorithm, algorithms based on the Burrows-Wheeler Transform (e.g., the Burrows Wheeler Aligner), ClustalW, Clustal X, BLAT, Novoalign (Novocraft Technologies; available at www.novocraft.com), ELAND (Illumina, San Diego, Calif.), SOAP (available at soap.genomics.org.cn), and Maq (available at maq.sourceforge.net). The ability of a guide sequence (within a nucleic acid-targeting guide RNA) to direct sequence-specific binding of a nucleic acid-targeting complex to a target nucleic acid sequence may be assessed by any suitable assay. For example, the components of a nucleic acid-targeting CRISPR system sufficient to form a nucleic acid-targeting complex, including the guide sequence to be tested, may be provided to a host cell having the corresponding target nucleic acid sequence, such as by transfection with vectors encoding the components of the nucleic acid-targeting complex, followed by an assessment of preferential targeting (e.g., cleavage) within the target nucleic acid sequence, such as by Surveyor assay as described herein. Similarly, cleavage of a target nucleic acid sequence (or a sequence in the vicinity thereof) may be evaluated in a test tube by providing the target nucleic acid sequence, components of a nucleic acid-targeting complex, including the guide sequence to be tested and a control guide sequence different from the test guide sequence, and comparing binding or rate of cleavage at or in the vicinity of the target sequence between the test and control guide sequence reactions. Other assays are possible, and will occur to those skilled in the art. A guide sequence, and hence a nucleic acid-targeting guide RNA may be selected to target any target nucleic acid sequence.

[0293] In some embodiments, the guide molecule comprises a guide sequence that is designed to have at least one mismatch with the target sequence, such that an RNA duplex formed between the guide sequence and the target sequence comprises a non-pairing C in the guide sequence opposite to the target A for deamination on the target sequence. In some embodiments, aside from this A-C mismatch, the degree of complementarity, when optimally aligned using a suitable alignment algorithm, is about or more than about 50%, 60%, 75%, 80%, 85%, 90%, 95%, 97.5%, 99%, or more. In some cases, the distance between the non-pairing C and the 5′ end of the guide sequence is from about 10 to about 50, e.g., from about 10 to about 20, from about 15 to about 25, from about 20 to about 30, from about 25 to about 35, from about 30 to about 40, from about 35 to about 45, or from about 40 to about 50 nucleotides (nt) in length. In certain example. In some cases, the distance between the non-pairing C and the 3′ end of the guide sequence is from about 10 to about 50, e.g., from about 10 to about 20, from about 15 to about 25, from about 20 to about 30, from about 25 to about 35, from about 30 to about 40, from about 35 to about 45, or from about 40 to about 50 nucleotides (nt) in length. In one example, the distance between the non-pairing C and the 5′ end of said guide sequence is from about 20 to about 30 nucleotides.

[0294] In certain embodiments, the guide sequence or spacer length of the guide molecules is from 15 to 50 nt. In certain embodiments, the spacer length of the guide RNA is at least 15 nucleotides. In certain embodiments, the spacer length is from 15 to 17 nt, e.g., 15, 16, or 17 nt, from 17 to 20 nt, e.g., 17, 18, 19, or 20 nt, from 20 to 24 nt, e.g., 20, 21, 22, 23, or 24 nt, from 23 to 25 nt, e.g., 23, 24, or 25 nt, from 24 to 27 nt, e.g., 24, 25, 26, or 27 nt, from 27-30 nt, e.g., 27, 28, 29, or 30 nt, from 30-35 nt, e.g., 30, 31, 32, 33, 34, or 35 nt, or 35 nt or longer. In certain example embodiment, the guide sequence is 15, 16, 17,18, 19, 20, 21, 22, 23, 24, 25, 26, 27, 28, 29, 30, 31, 32, 33, 34, 35, 36, 37, 38, 39 40, 41, 42, 43, 44, 45, 46, 47 48, 49, 50, 51, 52, 53, 54, 55, 56, 57, 58, 59, 60, 61, 62, 63, 64, 65, 66, 67, 68, 69, 70, 71, 72, 73, 74, 75, 76, 77, 78, 79, 80, 81, 82, 83, 84, 85, 86, 87, 88, 89, 90, 91, 92, 93, 94, 95, 96, 97, 98, 99, or 100 nt.

[0295] In some embodiments, the guide sequence has a length from about 10 to about 100, e.g., from about 20 to about 60, from about 20 to about 55, from about 20 to about 53, from about 25 to about 53, from about 29 to about 53, from about 20 to about 30, from about 25 to about 35, from about 30 to about 40, from about 35 to about 45, from about 40 to about 50, from about 45 to about 55, from about 50 to about 60, from about 55 to about 65, from about 60 to about 70, from about 70 to about 80, from about 80 to about 90, or from about 90 to about 100 nucleotides (nt) long that is capable of forming an RNA duplex with a target sequence. In certain example, the guide sequence has a length from about 20 to about 53 nt capable of forming said RNA duplex with said target sequence. In certain example, the guide sequence has a length from about 25 to about 53 nt capable of forming said RNA duplex with said target sequence. In certain example, the guide sequence has a length from about 29 to about 53 nt capable of forming said RNA duplex with said target sequence. In certain example, the guide sequence has a length from about 40 to about 50 nt capable of forming said RNA duplex with said target sequence. In some examples, the guide sequence comprises a non-pairing Cytosine at a position corresponding to said Adenine resulting in an A-C mismatch in the RNA duplex formed. The guide sequence is selected so as to ensure that it hybridizes to the target sequence comprising the adenosine to be deaminated.

[0296] In some embodiments, the guide sequence is about 10 nt to about 100 nt long and hybridizes to the target DNA strand to form an almost perfectly matched duplex, except for having a dA-C mismatch at the target adenosine site. Particularly, in some embodiments, the dA-C mismatch is located close to the center of the target sequence (and thus the center of the duplex upon hybridization of the guide sequence to the target sequence), thereby restricting the nucleotide deaminase to a narrow editing window (e.g., about 4 bp wide). In some embodiments, the target sequence may comprise more than one target adenosine to be deaminated. In further embodiments, the target sequence may further comprise one or more dA-C mismatch 3′ to the target adenosine site. In some embodiments, to avoid off-target editing at an unintended Adenine site in the target sequence, the guide sequence can be designed to comprise a non-pairing Guanine at a position corresponding to said unintended Adenine to introduce a dA-G mismatch, which is catalytically unfavorable for certain nucleotide deaminases such as ADAR1 and ADAR2. See Wong et al., RNA 7:846-858 (2001), which is incorporated herein by reference in its entirety.

[0297] In some embodiments, the sequence of the guide molecule (direct repeat and/or spacer) is selected to reduce the degree secondary structure within the guide molecule. In some embodiments, about or less than about 75%, 50%, 40%, 30%, 25%, 20%, 15%, 10%, 5%), 1%), or fewer of the nucleotides of the nucleic acid-targeting guide RNA participate in self-complementary base pairing when optimally folded. Optimal folding may be determined by any suitable polynucleotide folding algorithm. Some programs are based on calculating the minimal Gibbs free energy. An example of one such algorithm is mFold, as described by Zuker and Stiegler (Nucleic Acids Res. 9 (1981), 133-148). Another example folding algorithm is the online webserver RNAfold, developed at Institute for Theoretical Chemistry at the University of Vienna, using the centroid structure prediction algorithm (see e.g., A. R. Gruber et al., 2008, Cell 106(1): 23-24; and PA Carr and GM Church, 2009, Nature Biotechnology 27(12): 1151-62).

[0298] In some embodiments, it is of interest to reduce the susceptibility of the guide molecule to RNA cleavage, such as to cleavage by Cas7-11. Accordingly, in particular embodiments, the guide molecule is adjusted to avoid cleavage by Cas7-11 or other RNA-cleaving enzymes.

[0299] In some embodiments, the guide molecule is modified, e.g., by one or more aptamer(s) designed to improve guide molecule delivery, including delivery across the cellular membrane, to intracellular compartments, or into the nucleus. Such a structure can include, either in addition to the one or more aptamer(s) or without such one or more aptamer(s), moiety(ies) so as to render the guide molecule deliverable, inducible or responsive to a selected effector. The invention accordingly comprehends a guide molecule that responds to normal or pathological physiological conditions, including without limitation pH, hypoxia, O₂ concentration, temperature, protein concentration, enzymatic concentration, lipid structure, light exposure, mechanical disruption (e.g. ultrasound waves), magnetic fields, electric fields, or electromagnetic radiation.

[0300] Adenosine Deaminase

[0301] The system may further comprise an adenosine deaminase or catalytic domain thereof. The adenosine deaminase protein or catalytic domain thereof deaminates an Adenine or Cytidine at the one or more codons thereby changing the codon to encode for an amino acid that is not post-translationally modified. The term “adenosine deaminase” or “adenosine deaminase protein” as used herein refers to a protein, a polypeptide, or one or more functional domain(s) of a protein or a polypeptide that is capable of catalyzing a hydrolytic deamination reaction that converts an adenine (or an adenine moiety of a molecule) to a hypoxanthine (or a hypoxanthine moiety of a molecule), as shown below. In some embodiments, the adenine-containing molecule is an adenosine (A), and the hypoxanthine-containing molecule is an inosine (I). The adenine-containing molecule can be deoxyribonucleic acid (DNA) or ribonucleic acid (RNA).

[chemical structure]

[0302] According to the present disclosure, adenosine deaminases that can be used in connection with the present disclosure include, but are not limited to, members of the enzyme family known as adenosine deaminases that act on RNA (ADARs), members of the enzyme family known as adenosine deaminases that act on tRNA (ADATs), and other adenosine deaminase domain-containing (AD AD) family members. According to the present disclosure, the adenosine deaminase is capable of targeting adenine in a RNA/DNA and RNA duplexes. Indeed, Zheng et al. (Nucleic Acids Res. 2017, 45(6): 3369-3377) demonstrate that ADARs can carry out adenosine to inosine editing reactions on RNA/DNA and RNA/RNA duplexes. The adenosine deaminase can be modified to increase its ability to edit DNA in a RNA/DNAn RNA duplex.

[0303] In some embodiments, the adenosine deaminase is derived from one or more metazoa species, including but not limited to, mammals, birds, frogs, squids, fish, flies and worms. In some embodiments, the adenosine deaminase is a human, cephalopod (e.g., squid) or Drosophila adenosine deaminase. In certain examples, the adenosine deaminase is a human adenosine deaminase. In certain examples, the adenosine deaminase is a cephalopod adenosine deaminase. In certain examples, the adenosine deaminase is a Drosophila adenosine deaminase.

[0304] Cytidine Deaminase

[0305] The term “cytidine deaminase” or “cytidine deaminase protein” as used herein refers to a protein, a polypeptide, or one or more functional domain(s) of a protein or a polypeptide that is capable of catalyzing a hydrolytic deamination reaction that converts a cytosine (or a cytosine moiety of a molecule) to an uracil (or an uracil moiety of a molecule), as shown below. In some embodiments, the cytosine-containing molecule is a cytidine (C), and the uracil-containing molecule is an uridine (U). The cytosine-containing molecule can be deoxyribonucleic acid (DNA) or ribonucleic acid (RNA).

[chemical structure]

[0306] According to the present disclosure, cytidine deaminases that can be used in connection with the present disclosure include, but are not limited to, members of the enzyme family known as apolipoprotein B mRNA-editing complex (APOBEC) family deaminase, an activation-induced deaminase (AID), or a cytidine deaminase 1 (CDA1). In particular embodiments, the deaminase in an APOBEC 1 deaminase, an APOBEC2 deaminase, an APOBEC3A deaminase, an APOBEC3B deaminase, an APOBEC3C deaminase, and APOBEC3D deaminase, an APOBEC3E deaminase, an APOBEC3F deaminase an APOBEC3G deaminase, an APOBEC3H deaminase, or an APOBEC4 deaminase. The cytidine deaminase can be modified to increase its ability to edit DNA in a RNA/DNAn RNA duplex.

[0307] In some embodiments, the cytidine deaminase is derived from one or more metazoa species, including but not limited to, mammals, birds, frogs, squids, fish, flies and worms. In some embodiments, the cytidine deaminase is a human, primate, cow, dog, rat or mouse cytidine deaminase.

[0308] CD (cytidine deaminase)-functionalized CRISPR system for RNA editing can be used for C to U conversions. In some embodiments, the cytidine deaminase protein or catalytic domain thereof is a human, rat or lamprey cytidine deaminase protein or catalytic domain thereof. In some embodiments, the cytidine deaminase protein or catalytic domain thereof is an apolipoprotein B mRNA-editing complex (APOBEC) family deaminase, an activation-induced deaminase (AID), or a cytidine deaminase 1 (CDA1). In some embodiments, the cytidine deaminase protein or catalytic domain thereof is an APOBEC1 deaminase comprising one or more mutations corresponding to W90A, W90Y, R118A, H121R, H122R, R126A, R126E, or R132E in rat APOBEC1, or an APOBEC3G deaminase comprising one or more mutations corresponding to W285A, W285Y, R313A, D316R, D317R, R320A, R320E, or R326E in human APOBEC3G. In some embodiments, the cytidine deaminase protein or catalytic domain thereof is delivered together with an uracil glycosylase inhibitor (UGI), where said UGI is covalently linked to said cytidine deaminase protein or catalytic domain thereof and/or said catalytically inactive Cas7-11 protein.

[0309] Cas7-11-APOBEC fusions can perform C-to-U editing of RNA. APOBEC substrates are ssRNA and the Cas7-11-APOBEC can therefore target regions of the RNA around the guide/target duplex. Cas7-11-APOBEC fusions can perform C to U knockdown via stop codon introduction. In addition to correcting pathogenic U to C mutations that arise during the cellular life cycle, Cas7-11-APOBEC fusions can lead to the introduction of stop codons by converting a CAA, CGA, or CAG to TAA, TGA, or TAG, respectively. APOBEC orthologs in fusion with Cas7-11 can increase the efficiency of C-to-U editing, or can allow for additional types of base conversions. Mutating the APOBEC from the Cas7-11-APOBEC can lead to fusions with specific dsRNA activity, base flip activity and increased activity.

[0310] In certain example embodiments, the deaminase is selected from Table 2.

TABLE 2

| SEQ ID NO & | |
|---|---|
| Deaminase Name | Protein Sequence |
| SEQ ID NO: 33 | QLHLPQVLADAVSRLVLGKFGDLTDNFSSPHARRKVLAGVVMTTGTDVKDAKV |
| Homo | ISVSTGTKCINGEYMSDRGLALNDCHAEIISRRSLLRFLYTQLELYLNNKDDQKRS |
| sapiens_ADAR2_E_Q_ | IFQKSERGGFRLKENVQFHLYISTSPCGDARIFSPHEPILEEPADRHPNRKARGQLR |
| Mutant | TKIESGQGTIPVRSNASIQTWDGVLQGERLLTMSCSDKIARWNVVGIQGSLLSIFV |
| | EPIYFSSIILGSLYHGDHLSRAMYQRISNIEDLPPLYTLNKPLLSGISNAEARQPGKA |
| | PNFSVNWTVGDSAIEVINATTGKDELGRASRLCKHALYCRWMRVHGKVPSHLL |
| | RSKITKPNVYHESKLAAKEYQAAKARLFTAFIKAGLGAWVEKPTEQDQFSLT* |
| SEQ ID NO: 34 | SLGTGNRCVKGDSLSLKGETVNDCHAEIISRRGFIRFLYSELMKYNSQTAKDSIFE |
| Homo | PAKGGEKLQIKKTVSFHLYISTAPCGDGALFDKSCSDRAMESTESRHYPVFENPK |
| sapiens_ADAR1_E_Q_ | QGKLRTKVENGQGTIPVESSDIVPTWDGIRLGERLRTMSCSDKILRWNVLGLQGA |
| Mutant | LLTHFLQPIYLKSVTLGYLFSQGHLTRAICCRVTRDGSAFEDGLRHPFIVNHPKVG |
| | RVSIYDSKRQSGKTKETSVNWCLADGYDLEILDGTRGTVDGPRNELSRVSKKNIF |
| | LLFKKLCSFRYRRDLLRLSYGEAKKAARDYETAKNYFKKGLKDMGYGNWISKP |
| | QEEKNF |
| SEQ ID NO: 35 | SVGTGNRCLTGDHLSLEGNSVNDSHAEMITRRGFLRYLYRHLLEYDAEVPNDLF |
| Octopus | EKGERSICRIKTNITFHLYISTAPCGDGALFSPRDTDSSNAKMEEENKHIHNPTFSS |
| vulgaris_ADAR1_E_Q_ | SVQGLLRTKVEGGQGTIPIDADFTEQTWDGIQRGERLRTMSCSDKICRWNVVGL |
| Mutant | QGALLSHFIEPIYLDSLTLGYLYDHGHLARAVCCRIERGEASVNQLLPEGYRLNH |
| | PWLGRVTACDPPRETQKTKSLSINWCYDDEKSEVLDGTAGICYTAIEKNLFSRLT |
| | KHNLYEEFKRVCRKFDRNDLLTAPSYNKAKMMATPFQTAKNVMLKKLKENNC |
| | GTWVSKPIEEEMF |
| SEQ ID NO: 36 | SVGTGNRCLTGDRLSLEGNSVNDSHAEMVTRRGFLRYLYKHLLEYDPEKPHDLF |
| Sepia_ADAR1_E_Q_ | EKGERSLCRIKTNITFHLYISTAPCGDGALFSPRDTDSSNVKVDEENKHVHNPTFS |
| Mutant | SSVQGLLRTKVEGGQGTIPIDADFTEQTWDGIQRGERLRTMSCSDKICRWNVVGL |
| | QGALLSHFVEPIYLESLTLGYLYDHGHLARAVCCRIERGEASVNQLLPEGYRLNH |
| | PWLGRVTACDPPRETQKTKSLSINWCYDDEKSEVLDGTAGICYTAIEKNLFSRLT |
| | KHSLYEEFKKVCQKFEREDLLNVTSYNKAKMMAIPFQTAKNVMLKKLKENNCG |
| | TWVSKPIEEEMF |
| SEQ ID NO: 37 | GIGTGTKCINGEHMSDRGFGVNDCHAEIIARRCFLRYIYDQLELHLSDNSDVRNSS |
| Octopus | IFELRDKGGYQLKENIQFHLYISTAPCGDARIFSPHGQDVETGDRHPNRKARGQL |
| vulgaris_ADAR2_E_Q_ | RTKIESGQGTIPVRTSGVIQTWDGVLEGERLLTMSCSDKIARWNVLGIQGSLLSHF |
| Mutant | MNPIYLESIILGSLYHSDHLSRAMYSRISIIENLPEPFHLNRPFLSGISSPESRQPGKA |
| | PNFGINWRKEDETFEVINAMTGRVEGGSVSRICKQALFGRFMSLYGKLSSLTGQS |
| | VTTRPTHYSDAKAAVMEYQLAKQCVFQAFQKAGLGNWVQKPIEQDQF |
| SEQ ID NO: 38 | GIGTGTKCINGEYMNDRGFAVNDCHAEIIARRCFLRFIYDQLEMHLSEDPEVRGQ |
| Sepia_ADAR2_E_Q_ | SVFELRDGGGYKLKPNIHFHLYISTAPCGDARIFSPHGQDVETGDRHPNRKARGQ |
| Mutant | LRTKIESGQGTIPVRSSGFIQTWDGVLEGERLLTMSCSDKIARWNVLGIQGALLCH |
| | FMHPIYLESIILGSLYHSDHLSRAVYCRIASIENLPDLFQLNRPFLSGISSPESRQPG |
| | KAPNFGINWRRNDDTFEVINAMTGRVEGGNMSRICKQALFDRFMNLYGRLSSLT |
| | GQSVTTRPTLYSEAKAAVMEYQLAKQCVFQAFQKAGLGNWVQKPIEQDQF |
| SEQ ID NO: 39 | GIGTGTKCINGEYMNDRGFAVNDCHAEIIARRCFLRFIYDQLELHLSDNAEVRGQ |
| Doryteusthis | SIFELRDAGGYKLKPNIQFHLYISTAPCGDARIFSPHGQDVETGDRHPNRKARGQL |
| opalescens_ADAR2_E_ | RTKIESGQGTIPVRSSGFIQTWDGVLEGERLLTMSCSDKIARWNVLGVQGALLCH |
| Q_Mutant | FMHPIYLESIILGSLYHSDHLSRAVYCRIAAIENLPDLFRLNRPFLSGISSPESRQPG |
| | KAPNFGINWRRNDDSFEVINAMTGRVEGGSMSRICKQALFDRFMNLYGKLSSLT |
| | GQSVTTRPALYSEAKATVMEYQLAKQCVFQAFQKAGGNWVQKPIEQDQF |
| SEQ ID NO: 40 | MTSEKGPSTGDPTLRRRIEPWEFDVFYDPRELRKEACLLYEIKWGMSRKIWRSSG |
| APOBEC1 | KNTTNHVEVNFIKKFTSERDFHPSMSCSITWFLSWSPCWECSQAIREFLSRHPGVT |
| | LVIYVARLFWHMDQQNRQGLRDLVNSGVTIQIMRASEYYHCWRNFVNYPPGDE |
| | AHWPQYPPLWMMLYALELHCIILSLPPCLKISRRWQNHLTFFRLHLQNCHYQTIP |
| | PHILLATGLIHPSVAWR |
| SEQ ID NO: 41 | MAQKEEAAVATEAASQNGEDLENLDDPEKLKELIELPPFEIVTGERLPANFFKFQ |
| APOBEC2 | FRNVEYSSGRNKTFLCYVVEAQGKGGQVQASRGYLEDEHAAAHAEEAFFNTILP |
| | AFDPALRYNVTWYVSSSPCAACADRIIKTLSKTKNLRLLILVGRLFMWEEPEIQA |
| | ALKKLKEAGCKLRIMKPQDFEYVWQNFVEQEEGESKAFQPWEDIQENFLYYEEK |
| | LADILK |
| SEQ ID NO: 42 | MEASPASGPRHLMDPHIFTSNFNNGIGRHKTYLCYEVERLDNGTSVKMDQHRGF |
| APOBEC3A | LHNQAKNLLCGFYGRHAELRFLDLVPSLQLDPAQIYRVTWFISWSPCFSWGCAG |
| | EVRAFLQENTHVRLRIFAARIYDYDPLYKEALQMLRDAGAQVSIMTYDEFKHCW |
| | DTFVDHQGCPFQPWDGLDEHSQALSGRLRAILQNQGN |
| SEQ ID NO: 43 | MNPQIRNPMERMYRDTFYDNFENEPILYGRSYTWLCYEVKIKRGRSNLLWDTGV |
| APOBEC3B | FRGQVYFEPQYHAEMCFLSWFCGNQLPAYKCFQITWFVSWTPCPDCVAKLAEFL |
| | SEHPNVTLTISAARLYYYWERDYRRALCRLSQAGARVKIMDYEEFAYCWENFV |
| | YNEGQQFMPWYKFDENYAFLHRTLKEILRLRIFSVAFTAAMRSCASWTWFLLCS |
| | WTRPRSTGSLGSSPGAPASPGAVPGKCVRSFRRTHT |
| SEQ ID NO: 44 | MNPQIRNPMKAMYPGTFYFQFKNLWEANDRNETWLCFTVEGIKRRSVVSWKTG |
| APOBEC3C | VFRNQVDSETHCHAERCFLSWFCDDILSPNTKYQVTWYTSWSPCPDCAGEVAEF |
| | LARHSNVNLTIFTARLYYFQYPCYQEGLRSLSQEGVAVEIMDYEDFKYCWENFV |
| | YNDNEPFKPWKGLKTNFRLLKRRLRESLQ |
| SEQ ID NO: 45 | MNPQIRNPMERMYRDTFYDNFENEPILYGRSYTWLCYEVKIKRGRSNLLWDTGV |
| APOBEC3D | FRGPVLPKRQSNHRQEVYFRFENHAEMCFLSWFCGNRLPANRRFQITWFVSWNP |
| | CLPCVVKVIKFLAEHPNVTLTISAARLYYYRDRDWRWVLLRLHKAGARVKIMD |
| | YEGERCRGQGSMTGRNSLRDGWICNAMAGGVPGQPAGVGLALIATDSQETRPG |
| | RAGPGSGESLSASHLFISDFAYCWENFVCNEGQPFMPWYKFDDNYASLHRTLKEI |
| | LRNPMEAMYPHIFYFHFKNLLKACGRNESWLCFTMEVTKHHSAVFRKRGVFRN |
| | QVDPETHCHAERCFLSWFCDDILSPNTNYEVTWYTSWSPCPECAGEVAEFLARH |
| | SNVNLTIFTARLCYFWDTDYQEGLCSLSQEGASVKIMGYKDFVSCWKNFVYSDD |
| | EPFKPWKGLQTNFRLLKRRLREILQ |
| SEQ ID NO: 46 | MKPHFRNTVERMYRDTFSYNFYNRPILSRRNTVWLCYEVKTKGPSRPRLDAKIF |
| APOBEC3F | RGQVYSQPEHHAEMCFLSWFCGNQLPAYKCFQITWFVSWTPCPDCVAKLAEFL |
| | AEHPNVTLTISAARLYYYWERDYRRALCRLSQAGARVKIMDDEEFAYCWENFV |
| | YSEGQPFMPWYKFDDNYAFLHRTLKEILRNPMEAMYPHIFYFHFKNLRKAYGRN |
| | ESWLCFTMEVVKHHSPVSWKRGVFRNQVDPETHCHAERCFLSWFCDDILSPNTN |
| | YEVTWYTSWSPCPECAGEVAEFLARHSNVNLTIFTARLYYFWDTDYQEGLRSLS |
| | QEGASVEIMGYKDFKYCWENFVYNDDEPFKPWKGLKYNFLFLDSKLQEILE |
| SEQ ID NO: 47 | MELKYHPEMRFFHWFSKWRKLHRDQEYEVTWYISWSPCTKCTRDMATFLAEDP |
| APOBEC3G | KVTLTIFVARLYYFWDPDYQEALRSLCQKRDGPRATMKIMNYDEFQHCWSKFV |
| | YSQRELFEPWNNLPKYYILLHIMLGEILRHSMDPPTFTFNFMMEPWVRGRHETYL |
| | CYEVERMHNDTWVLLNQRRGFLCNQAPHKHGFLEGRHAELCFLDVIPFWKLDL |
| | DQDYRVTCFTSWSPCFSCAQEMAKFISKNKHVSLCIFTARIYDDQGRCQEGLRTL |
| | AEAGAKISIMTYSEFKHCWDTFVDHQGCPFQPWDGLDEHSQDLSGRLRAILQNQ |
| | EN |
| SEQ ID NO: 48 | MALLTAETFRLQFNNKRRLRRPYYPRKALLCYQLTPQNGSTPTRGYFENKKKCH |
| APOBEC3H | AEICFINEIKSMGLDETQCYQVTCYLTWSPCSSCAWELVDFIKAHDHLNLRIFASR |
| | LYYHWCKPQQDGLRLLCGSQVPVEVMGFPDSRGTCAGSLHGYIV |
| SEQ ID NO: 49 | MEPIYEEYLANHGTIVKPYYWLSFSLDCSNCPYHIRTGEEARVSLTEFCQIFGFPY |
| APOBEC4 | GTTFPQTKHLTFYELKTSSGSLVQKGHASSCTGNYIHPESMLFEMNGYLDSAIYN |
| | NDSIRHIILYSNNSPCNEANHCCISKMYNFLITYPGITLSIYFSQLYHTEMDFPASA |
| | WNREALRSLASLWPRVVLSPISGGIWHSVLHSFISGVSGSHVFQPILTGRALADRH |
| | NAYEINAITGVKPYFTDVLLQTKRNPNTKAQEALESYPLNNAFPGQFFQMPSGQL |
| | QPNLPPDLRAPVVFVLVPLRDLPPMEMGQNPNKPRNIVRHLNMPQMSFQETKDL |
| | GRLPTGRSVEIVEITEQFASSKEADEKKKKKGKK |
| SEQ ID NO: 50 | MDSLLMNRKFLYQFKNVRWAKGRRETYLCYVVKRRDSATSFSLDFGYLRNKNG |
| Activation-induced | CHVELLFLRYISDWDLDPGRCYRVTWFTSWSPCYDCARHVADFLRGNPNLSLRI |
| cytidine deaminase | FTARLYFCEDRKAEPEGLRRLHRAGVQIAIMTFKDYFYCWNTFVENHERTFKAW |
| (AID) | EGLHENSVRLSRQLRRILL |

### EXAMPLES

[0311] While several experimental Examples are contemplated, these Examples are intended non-limiting.

### Materials

[0312] Table 3 below shows examples of bacterial plasmids.

TABLE 3

| Plasmid | | |
|---|---|---|
| number | Name | Benchling link |
| pDF0038 | DsiCas7-11a full locus with | https://benchling.com/s/seq- |
| | CRISPR array | 72T3bYt8Ff9QNtG7aE2X |
| pDF0039 | DsiCas7-11a only expression | https://benchling.com/s/seq- |
| | with CRISPR array | uiS8cQyZLi2NrqfhxWF2 |
| pDF0044 | CjcCas7-11b full locus with | https://benchling.com/s/seq- |
| | synthetic array | GXIXQfFqwbN2vu7g6NUV |
| pDF0118 | DsiCas7-11a bacterial expression | https://benchling.com/s/seq- |
| | with Twinstrep-SUMO-Codon | PSpbXxlK66yLBw0TbxnY |
| pDF0163 | GwCas7-11c bacterial expression | https://benchling.com/s/seq- |
| | with Twinstrep-SUMO-Codon | CsMaJRrLeJ15XtHvMFd1 |
| pDF0191 | CjcCas7-11b bacterial expression | https://benchling.com/s/seq- |
| | with Twinstrep-SUMO-Codon | lLOOF2Yl8T6v2jUuQ9Q3 |
| pDF0229 | DsiCas7-11a expression vcetor | https://benchling.com/s/seq- |
| | with golden gate site for guides | mPWeEpoNVZVKxJwlIhVj |

[0313] Table 4 below shows examples of bacterial spacers.

TABLE 4

| SEQ ID NO | Spacer sequence | Target |
|---|---|---|
| SEQ ID NO: 51 | CTTTGTTGTCTTCGACATGGGTAATCCTCAT | MS2 targeting 1 |
| SEQ ID NO: 52 | TAAAGAGTTGAACTTCTTTGTTGTCTTCGAC | MS2 targeting 3 |
| SEQ ID NO: 53 | GTACCTTCGTACGGACGACCTTCACCTTCAC | RFP targeting 1 |
| SEQ ID NO: 54 | CAGGATGTCCCAAGCGAACGGCAGCGGACCA | RFP targeting 2 |
| SEQ ID NO: 55 | CAGGGAGGAGTCCTGGGTAACGGTAACAACA | RFP targeting 3 |
| SEQ ID NO: 56 | CATGAACTCTTTGATAACGTCTTCGCTACTC | RFP targeting 4 |
| SEQ ID NO: 57 | TCGGAGGTAGCCCGACTCGCTCCGGTTCGTA | non-targeting 1 |
| SEQ ID NO: 58 | TGAAAGTTGGCGCCTTTTTTCATACGTCGAG | non-targeting 2 |

[0314] Table 5 below shows examples of targets and pre-crRNA.

TABLE 5

| Target | Sequence |
|---|---|
| SEQ ID NO: 59 | GGGCGAAAUCGGUAUUUCCAAUGAAAUCACUCAGGUUGGAAAGCCGGUUUUC |
| DsiCas7-11 array | UUUGAUGUCACGGAACCGCCAAUAUAACAAUACAGGUAUUAUAGUUGGGUUG |
| (4DR-3S) | GAAAGCCGGUUUUCUUUGAUGUCACGGAACAUUGUAAACUGCAUAUCUGUGU |
| | UUGCCGUCUGGUUGGAAAGCCGGUUUUCUUUGAUGUCACGGAACUCACGUGA |
| | GUCAGUCUUAGUUCUAUACUUCUUUAGGGUUGGAAAGCCGGUUUUCUUUGAU |
| | GUCACGGAACAGGAACUUGAACAACAUCGUUACUAACGAG |
| SEQ ID NO: 60 | GGGGGCCAGUGAAUUCGAGCUCGGUACCCGGGGAUCCUCUAGAAAUAUGGAU |
| ssRNA 1 target | UACUUGGUAGAACAGCAAUCUACUCGACCUGCAGGCAUGCAAGCUUGGCGUA |
| | AUCAUGGUCAUAGCUGUUUCCUGUGUUUAUCCGCUCACAAUUCCACACAACA |
| | UACGAGCCGGAAGCAUAAAG |
| SEQ ID NO: 61 | GGGGCAAACUCCGGCAUCUACUAAUAGACGCCGGCCAUUCAAACAUGAGGAU |
| MS2 target for | UACCCAUGUCGAAGACAACAAAGAAGUUCAACUCUUUAUGUAUUGAUCUUCC |
| body labeling | UCGCGAUCUUUCUCUCGAAAUUUACCAAUCAAUUGCUUCUGUCGCUACU |
| SEQ ID NO: 62 | GGGGGCCAGUGAAUUCGAGCUCGGUACCCGGGGAUCCUCUAGAAAUAUGGAU |
| ssRNA 2 target | UACUUGGUAGAACAGCAAUCUACUCGACCUGCAGGCAUGCAAGCUUGGCGUA |
| | AUCAUGGUCAUAGCUGUUUCCUGUGUUUAUCCGCUCACAAUUCCACACA |
| SEQ ID NO: 63 | GGCCAGUGAAUUCGAGCUCGGUACCCGGGGAUCCUCUAGAAAUAUGGAUUAC |
| fixed crRNA | UUGGGUCGAAGACAACAAAGAAGUUCAACUCUUUAUAGAACAGCAAUCUACU |
| target 1 | CGACCUGCAGGCAUGCAAGCUUGGCGUAAUCAUGGUCAUAGCUGUU |
| SEQ ID NO: 64 | AUGCCCGCCAUGAAGAUCGAGUGCCGCAUCACCGGCACCCUGAACGGCGUGGA |
| fixed crRNA | GUUGUCGAAGACAACAAAGAAGUUCAACUCUUUACGAGCUGGUGGGCGGCGG |
| target 2 | AGAGGGCACCCCCGAGCAGGGCCGCAUGACCAACAAGAUGAAGAG |
| SEQ ID NO: 65 | AUUCUAUGUCUGGUUUUCGCUCAAAAACUUCCCGGAAAUGACAACAGCACGG |
| fixed crRNA | CAACGUCGAAGACAACAAAGAAGUUCAACUCUUUAGCUGUGCCUUGGGCACC |
| target 3 | AUGCAGUACCAAACGGAACGAUAGUGAAAACAAUCACGAAUGACCA |
| SEQ ID NO: 66 | AUUCUAUGUCUGGUUUUCGCUCAAAAACUUCCCGGAAAUGACAACAGCACGG |
| fixed crRNA | CAACGUCGAAGACAACAAAGAAGUUCAACUCUUUAGCUGUGCCUUGGGCACC |
| target 4 | AUGCAGUACCAAACGGAACGAUAGUGAAAACAAUCACGAAUGACCA |
| SEQ ID NO: 67 | GCUGUGCCUUGGGCACCAUGCAGUACCAAACGGAACGAUAGUGAAAACAAUC |
| fixed crRNA | ACGAAUGACCAGUCGAAGACAACAAAGAAGUUCAACUCUUUAAUUCUAUGUC |
| target 5 | UGGUUUUCGCUCAAAAACUUCCCGGAAAUGACAACAGCACGGCAAC |
| SEQ ID NO: 68 | GGGGUUUGGAAGCCGGGUCGAAGUCAGGCCCGUUAAGACCGAGUAGAUUGCU |
| GwCas7-11 | GUUCUACCAAGUAAUCCAGUUUGGAAGCCGGGUCGAAGUCAGGCCCGUUAAG |
| array (3DR-2S) | ACUAUGCUUCCGGCUCGUAUGUUGUGUGGAAUUGUUUGGAAGCCGGGUCGAA |
| | GUCAGGCCCGUUAAGAC |
| SEQ ID NO: 69 | GGGGCUAGCUCAGUCCUAGGUAUAAUGCUAGCGCUGAUUUAGGCAAAAACGG |
| CjcCas7-11 array | CUUGAAGACUAAAGGAAGGAAUUAAUGUCACGGUACGACUAAAUGGCACCAC |
| (3DR-2S) | UAAUUGUUGCCUUCUAAGUUCCUUCUUGAAGACUAAAGGAAGGAAUUAAUGU |
| | CACGGUACGUUUGUUUAACCACAUGAGGCACACCGCCCUCGUGAGCUUGAAG |
| | ACUAAAGGAAGGAAUUAAUGUCACGGUACAAUCUCCGCCCCGUUCGUAAGC |
| SEQ ID NO: 70 | AUGCCCGCCAUGAAGAUCGAGUGCCGCAUCACCGGCACCCUGAACGGCGUGGA |
| EGFP ssRNA | GUUCGAGCUGGUGGGCGGCGGAGAGGGCACCCCCGAGCAGGGCCGCAUGACC |
| 400 nt | AACAAGAUGAAGAGCACCAAAGGCGCCCUGACCUUCAGCCCCUACCUGCUGAG |
| | CCACGUGAUGGGCUACGGCUUCUACCACUUCGGCACCUACCCCAGCGGCUACG |
| | AGAACCCCUUCCUGCACGCCAUCAACAACGGCGGCUACACCAACACCCGCAUC |
| | GAGAAGUACGAGGACGGCGGCGUGCUGCACGUGAGCUUCAGCUACCGCUACG |
| | AGGCCGGCCGCGUGAUCGGCGACUUCAAGGUGGUGGGCACCGGCUUCCCCGAG |
| | GACAGCGUGAUCUUCACCGACAAGAUCAUCC |
| SEQ ID NO: 71 | GGGGUUGGAAAGCCGGUUUUCUUUGAUGUCACGGAACCUUUGUUGUCUUCGA |
| MS2 crRNA 1 | CAUGGGUAAUCCUCAUGGUUGGAAAGCCGGUUUUCUUUGAUGUCACGGAAC |
| (mini array) WT | |
| SEQ ID NO: 72 | GGCGUUGGAAAGCCGGUUUUCUUUGAUGUCACGGAACCUUUGUUGUCUUCGA |
| MS2 crRNA 1 | CAUGGGUAAUCCUCAUCGUUGGAAAGCCGGUUUUCUUUGAUGUCACGGAAC |
| (mini array) | |
| mutant pos 1 | |
| SEQ ID NO: 73 | GGGGAUGGAAAGCCGGUUUUCUUUGAUGUCACGGAACCUUUGUUGUCUUCGA |
| MS2 crRNA 1 | CAUGGGUAAUCCUCAUGGAUGGAAAGCCGGUUUUCUUUGAUGUCACGGAAC |
| (mini array) | |
| mutant pos 3 | |
| SEQ ID NO: 74 | GGGGUUCGAAAGCCGGUUUUCUUUGAUGUCACGGAACCUUUGUUGUCUUCGA |
| MS2 crRNA 1 | CAUGGGUAAUCCUCAUGGUUCGAAAGCCGGUUUUCUUUGAUGUCACGGAAC |
| (mini array) | |
| mutant pos 5 | |
| SEQ ID NO: 75 | GGGGUUGGUAAGCCGGUUUUCUUUGAUGUCACGGAACCUUUGUUGUCUUCGA |
| MS2 crRNA 1 | CAUGGGUAAUCCUCAUGGUUGGUAAGCCGGUUUUCUUUGAUGUCACGGAAC |
| (mini array) | |
| mutant pos 7 | |
| SEQ ID NO: 76 | GGGGUUGGAAUGCCGGUUUUCUUUGAUGUCACGGAACCUUUGUUGUCUUCGA |
| MS2 crRNA 1 | CAUGGGUAAUCCUCAUGGUUGGAAUGCCGGUUUUCUUUGAUGUCACGGAAC |
| (mini array) | |
| mutant pos 9 | |
| SEQ ID NO: 77 | GGGGUUGGAAAGGCGGUUUUCUUUGAUGUCACGGAACCUUUGUUGUCUUCGA |
| MS2 crRNA 1 | CAUGGGUAAUCCUCAUGGUUGGAAAGGCGGUUUUCUUUGAUGUCACGGAAC |
| (mini array) | |
| mutant pos 11 | |
| SEQ ID NO: 78 | GGGGUUGGAAAGCCCGUUUUCUUUGAUGUCACGGAACCUUUGUUGUCUUCGA |
| MS2 crRNA 1 | CAUGGGUAAUCCUCAUGGUUGGAAAGCCCGUUUUCUUUGAUGUCACGGAAC |
| (mini array) | |
| mutant pos 13 | |
| SEQ ID NO: 79 | GGGGUUGGAAAGCCGGAUUUCUUUGAUGUCACGGAACCUUUGUUGUCUUCGA |
| MS2 crRNA 1 | CAUGGGUAAUCCUCAUGGUUGGAAAGCCGGAUUUCUUUGAUGUCACGGAAC |
| (mini array) | |
| mutant pos 15 | |
| SEQ ID NO: 80 | GGGGUUGGAAAGCCGGUUAUCUUUGAUGUCACGGAACCUUUGUUGUCUUCGA |
| MS2 crRNA 1 | CAUGGGUAAUCCUCAUGGUUGGAAAGCCGGUUAUCUUUGAUGUCACGGAAC |
| (mini array) | |
| mutant pos 17 | |
| SEQ ID NO: 81 | GGGGUUGGAAAGCCGGUUUUGUUUGAUGUCACGGAACCUUUGUUGUCUUCGA |
| MS2 crRNA 1 | CAUGGGUAAUCCUCAUGGUUGGAAAGCCGGUUUUGUUUGAUGUCACGGAAC |
| (mini array) | |
| mutant pos 19 | |
| SEQ ID NO: 82 | GGGGUUGGAAAGCCGGUUUUCUAUGAUGUCACGGAACCUUUGUUGUCUUCGA |
| MS2 crRNA 1 | CAUGGGUAAUCCUCAUGGUUGGAAAGCCGGUUUUCUAUGAUGUCACGGAAC |
| (mini array) | |
| mutant pos 21 | |
| SEQ ID NO: 83 | GGGGUUGGAAAGCCGGUUUUCUUUCAUGUCACGGAACCUUUGUUGUCUUCGA |
| MS2 crRNA 1 | CAUGGGUAAUCCUCAUGGUUGGAAAGCCGGUUUUCUUUCAUGUCACGGAAC |
| (mini array) | |
| mutant pos 23 | |
| SEQ ID NO: 84 | GGGGUUGGAAAGCCGGUUUUCUUUGAAGUCACGGAACCUUUGUUGUCUUCGA |
| MS2 crRNA 1 | CAUGGGUAAUCCUCAUGGUUGGAAAGCCGGUUUUCUUUGAAGUCACGGAAC |
| (mini array) | |
| mutant pos 25 | |
| SEQ ID NO: 85 | GGGGUUGGAAAGCCGGUUUUCUUUGAUGACACGGAACCUUUGUUGUCUUCGA |
| MS2 crRNA 1 | CAUGGGUAAUCCUCAUGGUUGGAAAGCCGGUUUUCUUUGAUGACACGGAAC |
| (mini array) | |
| mutant pos 27 | |
| SEQ ID NO: 86 | GGGGUUGGAAAGCCGGUUUUCUUUGAUGUCUCGGAACCUUUGUUGUCUUCGA |
| MS2 crRNA 1 | CAUGGGUAAUCCUCAUGGUUGGAAAGCCGGUUUUCUUUGAUGUCUCGGAAC |
| (mini array) | |
| mutant pos 29 | |
| SEQ ID NO: 87 | GGGGUUGGAAAGCCGGUUUUCUUUGAUGUCACCGAACCUUUGUUGUCUUCGA |
| MS2 crRNA 1 | CAUGGGUAAUCCUCAUGGUUGGAAAGCCGGUUUUCUUUGAUGUCACCGAAC |
| (mini array) | |
| mutant pos 31 | |
| SEQ ID NO: 88 | GGGGUUGGAAAGCCGGUUUUCUUUGAUGUCACGGUACCUUUGUUGUCUUCGA |
| MS2 crRNA 1 | CAUGGGUAAUCCUCAUGGUUGGAAAGCCGGUUUUCUUUGAUGUCACGGUAC |
| (mini array) | |
| mutant pos 33 | |
| SEQ ID NO: 89 | GGGGUUGGAAAGCCGGUUUUCUUUGAUGUCACGGUAGCUUUGUUGUCUUCGA |
| MS2 crRNA 1 | CAUGGGUAAUCCUCAUGGUUGGAAAGCCGGUUUUCUUUGAUGUCACGGUAG |
| (mini array) | |
| mutant pos 35 | |
| SEQ ID NO: 90 | GGGGUUGGAAAGCCGGUUUUCUUUGAUGUCACGGAACCUUUGUUGUCUUCGA |
| MS2 crRNA 1 | CAUGGGUAAUCCUCAUGGUUGGAAAGCCGGUUUUCUUUGAUGUCACGGAAC |
| (mini array) WT | |
| SEQ ID NO: 91 | GGGGUUGGAAAGGGGGUUUUCUUUGAUGUCACGGAACCUUUGUUGUCUUCGA |
| MS2 crRNA 1 | CAUGGGUAAUCCUCAUGGUUGGAAAGGGGGUUUUCUUUGAUGUCACGGAAC |
| (mini array) | |
| double mutant | |
| pos 11 | |
| SEQ ID NO: 92 | GGGGUUGGAAAGCCGCAUUUCUUUGAUGUCACGGAACCUUUGUUGUCUUCGA |
| MS2 crRNA 1 | CAUGGGUAAUCCUCAUGGUUGGAAAGCCGCAUUUCUUUGAUGUCACGGAAC |
| (mini array) | |
| double mutant | |
| pos 14 | |
| SEQ ID NO: 93 | GGGGUUGGAAAGCCGGUUAACUUUGAUGUCACGGAACCUUUGUUGUCUUCGA |
| MS2 crRNA 1 | CAUGGGUAAUCCUCAUGGUUGGAAAGCCGGUUAACUUUGAUGUCACGGAAC |
| (mini array) | |
| double mutant | |
| pos 17 | |
| SEQ ID NO: 94 | GGGGUUGGAAAGCCGGUUUUGAUUGAUGUCACGGAACCUUUGUUGUCUUCGA |
| MS2 crRNA 1 | CAUGGGUAAUCCUCAUGGUUGGAAAGCCGGUUUUGAUUGAUGUCACGGAAC |
| (mini array) | |
| double mutant | |
| pos 19 | |
| SEQ ID NO: 95 | GGGGUUGGAAAGCCGGUUUUCUUACAUGUCACGGAACCUUUGUUGUCUUCGA |
| MS2 crRNA 1 | CAUGGGUAAUCCUCAUGGUUGGAAAGCCGGUUUUCUUACAUGUCACGGAAC |
| (mini array) | |
| double mutant | |
| pos 22 | |
| SEQ ID NO: 96 | GGGGUUGGAAAGCCGGUUUUCUUUGAACUCACGGAACCUUUGUUGUCUUCGA |
| MS2 crRNA 1 | CAUGGGUAAUCCUCAUGGUUGGAAAGCCGGUUUUCUUUGAACUCACGGAAC |
| (mini array) | |
| double mutant | |
| pos 25 | |
| SEQ ID NO: 97 | GGGGUUGGAAAGCCGGUUUUCUUUGAUGUGUCGGAACCUUUGUUGUCUUCGA |
| MS2 crRNA 1 | CAUGGGUAAUCCUCAUGGUUGGAAAGCCGGUUUUCUUUGAUGUGUCGGAAC |
| (mini array) | |
| double mutant | |
| pos 28 | |
| SEQ ID NO: 98 | GGGGUUGGAAAGCCGGUUUUCUUUGAUGUCACCCAACCUUUGUUGUCUUCGA |
| MS2 crRNA 1 | CAUGGGUAAUCCUCAUGGUUGGAAAGCCGGUUUUCUUUGAUGUCACCCAAC |
| (mini array) | |
| double mutant | |
| pos 31 | |
| SEQ ID NO: 99 | GGGGUUGGAAAGCCGGUUUUCUUUGAUGUCACGGAUGCUUUGUUGUCUUCGA |
| MS2 crRNA 1 | CAUGGGUAAUCCUCAUGGUUGGAAAGCCGGUUUUCUUUGAUGUCACGGAUG |
| (mini array) | |
| double mutant | |
| pos 34 | |
| SEQ ID NO: 100 | GGGAAAUCAGCGAAAUGCACCCCGCAUUACGUUUGGUGGACCCUCAGAUUCA |
| SARS-CoV2 | ACUGGCAGUAACCAGAAUGGAGAACGCAGUGGGGCGCGAUCAAAACAACGUC |
| ssRNA | GGCCCCAAGGUUUACCCAAUAAUACUGCGUCUUGGUUCACCGCUCUCAC |
| SEQ ID NO: 101 | GGGAUUCUAUGUCUGGUUUUCGCUCAAAAACUUCCCGGAAAUGACAACAGCA |
| Influenza A | CGGCAACGCUGUGCCUUGGGCACCAUGCAGUACCAAACGGAACGAUAGUGAA |
| segment 4 HA | AACAAUCACGAAUGACCAAAUUGAAGUCACUAAUGCUACUGAACUGGUU |
| gene | |
| SEQ ID NO: 102 | GGGATGAGGATTACCCATGTCGAAGACAACAAAG |
| 34-nt MS2 | |
| ssRNA target | |
| SEQ ID NO: 103 | AUGCCCGCCAUGAAGAUCGAGUGCCGCAUCACCGGCACCCUGAACGGCGUGGA |
| EGFP ssRNA | GUUCGAGCUGGUGGGCGGCGGAGAGGGCACCCCCGAGCAGGGCCGCA |
| 100 nt | |
| SEQ ID NO: 104 | AUGCCCGCCAUGAAGAUCGAGUGCCGCAUCACCGGCACCCUGAACGGCGUGGA |
| EGFP ssRNA | GUUCGAGCUGGUGGGCGGCGGAGAGGGCACCCCCGAGCAGGGCCGCAUGACC |
| 200 nt | AACAAGAUGAAGAGCACCAAAGGCGCCCUGACCUUCAGCCCCUACCUGCUGAG |
| | CCACGUGAUGGGCUACGGCUUCUACCACUUCGGCACCUACCC |
| SEQ ID NO: 105 | AUGCCCGCCAUGAAGAUCGAGUGCCGCAUCACCGGCACCCUGAACGGCGUGGA |
| EGFP ssRNA | GUUCGAGCUGGUGGGCGGCGGAGAGGGCACCCCCGAGCAGGGCCGCAUGACC |
| 600 nt | AACAAGAUGAAGAGCACCAAAGGCGCCCUGACCUUCAGCCCCUACCUGCUGAG |
| | CCACGUGAUGGGCUACGGCUUCUACCACUUCGGCACCUACCCCAGCGGCUACG |
| | AGAACCCCUUCCUGCACGCCAUCAACAACGGCGGCUACACCAACACCCGCAUC |
| | GAGAAGUACGAGGACGGCGGCGUGCUGCACGUGAGCUUCAGCUACCGCUACG |
| | AGGCCGGCCGCGUGAUCGGCGACUUCAAGGUGGUGGGCACCGGCUUCCCCGAG |
| | GACAGCGUGAUCUUCACCGACAAGAUCAUCCGCAGCAACGCCACCGUGGAGCA |
| | CCUGCACCCCAUGGGCGAUAACGUGCUGGUGGGCAGCUUCGCCCGCACCUUCA |
| | GCCUGCGCGACGGCGGCUACUACAGCUUCGUGGUGGACAGCCACAUGCACUUC |
| | AAGAGCGCCAUCCACCCCAGCAUCCUGCAGAACGGGGGCCCCAUGUUCGCCUU |
| | CCGCCGCGUGGAGGAGCUG |
| SEQ ID NO: 106 | CCGGCCAUUCAAACAUGAGGAUUACCCAUGUCGAAGACAACAAAGAAGUUCA |
| 60 nt MS2 | ACUCUUUA |
| ssRNA | |
| SEQ ID NO: 107 | GGCCAGUGAAUUCGAGCUCGGUACCCGGGGAUCCUCUAGAAAUAUGGAUUAC |
| ssRNA 1 with | UUGgUAGAACAGCAAUCUACUCGNNNNNNACCUGCAGGCAUGCAAGCUUGGC |
| right PFS | GUAAUCAUGGUCAUAGCUGUUUCCUGUGUUUAUCCGCUCACAAUUCCACACA |
| | ACAUACGAGCCGGAAGCAU |
| SEQ ID NO: 108 | GGCCAGUGAAUUCGAGCUCGGUACCCGGGGAUCCUCUAGAAAUANNNNNNUG |
| ssRNA 1 with | GAUUACUUGgUAGAACAGCAAUCUACUCGACCUGCAGGCAUGCAAGCUUGGCG |
| left PFS | UAAUCAUGGUCAUAGCUGUUUCCUGUGUUUAUCCGCUCACAAUUCCACACAA |
| | CAUACGAGCCGGAAGCAU |
| SEQ ID NO: 109 | GGGAUGAGGAUUACCCAUGUCGAAGACAACAAAG |
| 31-nt MS2 | |
| ssRNA target | |
| SEQ ID NO: 110 | CCGGCATCTACTAATAGACGCCGGCCATTCAAACATGAGGATTACCCATGTCGA |
| MS2 ssDNA and | AGACAACAAAGAAGTTCAACTCTTTATGTATTGATCTTCCTCGCGA |
| dsDNA target | |

[0315] Table 6 below shows examples of crRNA for in vitro assays.

TABLE 6

| | SEQ ID | | SEQ ID | |
|---|---|---|---|---|
| Name | NO | DR sequence | NO | Spacer sequence |
| ssRNA | 111 | GGTTGGAAAGCCGGTTTTCTT | 112 | CGAGTAGATTGCTGTTCTacC |
| crRNA 5 | | TGATGTCACGGAAC | | AAGTAATCCA |
| ssRNA | 113 | GGTTGGAAAGCCGGTTTTCTT | 114 | TATGCTTCCGGCTCGTATGT |
| crRNA 1 | | TGATGTCACGGAAC | | TGTGTGGAATT |
| ssRNA | 115 | GGTTGGAAAGCCGGTTTTCTT | 116 | AACACAGGAAACAGCTATG |
| crRNA 2 | | TGATGTCACGGAAC | | ACCATGATTACG |
| ssRNA | 117 | GGTTGGAAAGCCGGTTTTCTT | 118 | AATTGTGAGCGGATAAACA |
| crRNA 3 | | TGATGTCACGGAAC | | CAGGAAACAGCT |
| ssRNA | 119 | GGTTGGAAAGCCGGTTTTCTT | 120 | TTGCTGTTCTacCAAGTAATC |
| crRNA 4 | | TGATGTCACGGAAC | | CATATTTCTA |
| ssRNA | 121 | GGTTGGAAAGCCGGTTTTCTT | 122 | TTTCTAGAGGATCCCCGGGT |
| crRNA 6 | | TGATGTCACGGAAC | | ACCGAGCTCGA |
| non targeting | 123 | GGTTGGAAAGCCGGTTTTCTT | 124 | CGCCAATATAACAATACAG |
| crRNA | | TGATGTCACGGAAC | | GTATTATAGTTG |
| MS2 guide 1 | 125 | GGTTGGAAAGCCGGTTTTCTT | 126 | CTTTGTTGTCTTCGACATGG |
| | | TGATGTCACGGAAC | | GTAATCCTCAT |
| MS2 guide 2 | 127 | GGTTGGAAAGCCGGTTTTCTT | 128 | CTTCTTTGTTGTCTTCGACA |
| | | TGATGTCACGGAAC | | TGGGTAATCCT |
| MS2 guide 3 | 129 | GGTTGGAAAGCCGGTTTTCTT | 130 | TAAAGAGTTGAACTTCTTTG |
| | | TGATGTCACGGAAC | | TTGTCTTCGAC |
| MS2 guide 4 | 131 | GGTTGGAAAGCCGGTTTTCTT | 132 | TCTTTGTTGTCTTCGACATG |
| | | TGATGTCACGGAAC | | GGTAATCCTCA |
| MS2 | 133 | GGTTGGAAAGCCGGTTTTCTT | 134 | TAATCCTCATGTTTGAATGG |
| additional | | TGATGTCACGGAAC | | CCGGCGTCTAT |
| spacer 1 | | | | |
| MS2 | 135 | GGTTGGAAAGCCGGTTTTCTT | 136 | TTCGACATGGGTAATCCTCA |
| additional | | TGATGTCACGGAAC | | TGTTTGAATGG |
| spacer 2 | | | | |
| MS2 | 137 | GGTTGGAAAGCCGGTTTTCTT | 138 | CGAGGAAGATCAATACATA |
| additional | | TGATGTCACGGAAC | | AAGAGTTGAACT |
| spacer 3 | | | | |
| MS2 | 139 | GGTTGGAAAGCCGGTTTTCTT | 140 | TGGTAAATTTCGAGAGAAA |
| additional | | TGATGTCACGGAAC | | GATCGCGAGGAA |
| spacer 4 | | | | |
| MS2 | 141 | GGTTGGAAAGCCGGTTTTCTT | 142 | TTGAATGGCCGGCGTCTATT |
| additional | | TGATGTCACGGAAC | | AGTAGATGCCG |
| spacer 5 | | | | |
| fixed | 143 | GGTTGGAAAGCCGGTTTTCTT | 144 | AATCCATATTTCTAGAGGAT |
| position | | TGATGTCACGGAAC | | CCCCGGGTACC |
| ssRNA 1 | | | | |
| 150 nt guide | | | | |
| 1 | | | | |
| fixed | 145 | GGTTGGAAAGCCGGTTTTCTT | 146 | TGTTCTACCAAGTAATCCAT |
| position | | TGATGTCACGGAAC | | ATTTCTAGAGG |
| ssRNA 1 | | | | |
| 150 nt guide | | | | |
| 2 | | | | |
| fixed | 147 | GGTTGGAAAGCCGGTTTTCTT | 148 | TCGAGTAGATTGCTGTTCTA |
| position | | TGATGTCACGGAAC | | CCAAGTAATCC |
| ssRNA 1 | | | | |
| 150 nt guide | | | | |
| 3 | | | | |
| fixed | 149 | GGTTGGAAAGCCGGTTTTCTT | 150 | GCATGCCTGCAGGTCGAGT |
| position | | TGATGTCACGGAAC | | AGATTGCTGTTC |
| ssRNA 1 | | | | |
| 150 nt guide | | | | |
| 4 | | | | |
| fixed | 151 | GGTTGGAAAGCCGGTTTTCTT | 152 | TTACGCCAAGCTTGCATGCC |
| position | | TGATGTCACGGAAC | | TGCAGGTCGAG |
| ssRNA 1 | | | | |
| 150nt guide | | | | |
| 5 | | | | |
| fixed | 153 | GGTTGGAAAGCCGGTTTTCTT | 154 | GCTATGACCATGATTACGCC |
| position | | TGATGTCACGGAAC | | AAGCTTGCATG |
| ssRNA 1 | | | | |
| 150 nt guide | | | | |
| 6 | | | | |
| fixed | 155 | GGTTGGAAAGCCGGTTTTCTT | 156 | AATCCTCATGTTTGAATGGC |
| position MS2 | | TGATGTCACGGAAC | | CGGCGTCTATT |
| guide 1 | | | | |
| fixed | 157 | GGTTGGAAAGCCGGTTTTCTT | 158 | CTTCGACATGGGTAATCCTC |
| position MS2 | | TGATGTCACGGAAC | | ATGTTTGAATG |
| guide 2 | | | | |
| fixed | 159 | GGTTGGAAAGCCGGTTTTCTT | 160 | ACTTCTTTGTTGTCTTCGAC |
| position MS2 | | TGATGTCACGGAAC | | ATGGGTAATCC |
| guide 3 | | | | |
| fixed | 161 | GGTTGGAAAGCCGGTTTTCTT | 162 | CATAAAGAGTTGAACTTCTT |
| position MS2 | | TGATGTCACGGAAC | | TGTTGTCTTCG |
| guide 4 | | | | |
| fixed | 163 | GGTTGGAAAGCCGGTTTTCTT | 164 | AGGAAGATCAATACATAAA |
| position MS2 | | TGATGTCACGGAAC | | GAGTTGAACTTC |
| guide 5 | | | | |
| fixed | 165 | GGTTGGAAAGCCGGTTTTCTT | 166 | GAGAAAGATCGCGAGGAAG |
| position MS2 | | TGATGTCACGGAAC | | ATCAATACATAA |
| guide 6 | | | | |
| EGFP guide | 167 | GGTTGGAAAGCCGGTTTTCTT | 168 | AGGGTGCCGGTGATGCGGC |
| 1 | | TGATGTCACGGAAC | | ACTCGATCTTCA |
| EGFP guide | 169 | GGTTGGAAAGCCGGTTTTCTT | 170 | CCAGCTCGAACTCCACGCC |
| 2 | | TGATGTCACGGAAC | | GTTCAGGGTGCC |
| EGFP guide | 171 | GGTTGGAAAGCCGGTTTTCTT | 172 | CCCTCTCCGCCGCCCACCAG |
| 3 | | TGATGTCACGGAAC | | CTCGAACTCCA |
| EGFP guide | 173 | GGTTGGAAAGCCGGTTTTCTT | 174 | CGGCCCTGCTCGGGGGTGC |
| 4 | | TGATGTCACGGAAC | | CCTCTCCGCCGC |
| EGFP guide | 175 | GGTTGGAAAGCCGGTTTTCTT | 176 | ACGTGGCTCAGCAGGTAGG |
| 5 | | TGATGTCACGGAAC | | GGCTGAAGGTCA |
| EGFP guide | 177 | GGTTGGAAAGCCGGTTTTCTT | 178 | AGGTGCCGAAGTGGTAGAA |
| 6 | | TGATGTCACGGAAC | | GCCGTAGCCCAT |
| EGFP guide | 179 | GGTTGGAAAGCCGGTTTTCTT | 180 | TGGCGTGCAGGAAGGGGTT |
| 7 | | TGATGTCACGGAAC | | CTCGTAGCCGCT |
| EGFP guide | 181 | GGTTGGAAAGCCGGTTTTCTT | 182 | GTACTTCTCGATGCGGGTGT |
| 8 | | TGATGTCACGGAAC | | TGGTGTAGCCG |
| EGFP guide | 183 | GGTTGGAAAGCCGGTTTTCTT | 184 | GCGGCCGGCCTCGTAGCGG |
| 9 | | TGATGTCACGGAAC | | TAGCTGAAGCTC |
| EGFP guide | 185 | GGTTGGAAAGCCGGTTTTCTT | 186 | AAGCCGGTGCCCACCACCTT |
| 10 | | TGATGTCACGGAAC | | GAAGTCGCCGA |
| EGFP guide | 187 | GGTTGGAAAGCCGGTTTTCTT | 188 | AAGATCACGCTGTCCTCGG |
| 11 | | TGATGTCACGGAAC | | GGAAGCCGGTGC |
| GwCas7-11c | 189 | GTTTGGAAGCCGGGTCGAAG | 190 | CTTTGTTGTCTTCGACATGG |
| MS2 crRNA | | TCAGGCCCGTTAAGAC | | GTAATCCTCAT |
| CjcCas7-11b | 191 | cttgaagactaaaggaaggaattaatg | 192 | CTTTGTTGTCTTCGACATGG |
| MS2 crRNA | | tcacggtac | | GTAATCCTCAT |
| GwCas7-11c | 193 | GTTTGGAAGCCGGGTCGAAG | 194 | CGCCAATATAACAATACAG |
| non-targeting | | TCAGGCCCGTTAAGAC | | GTATTATAGTTG |
| crRNA | | | | |
| CjcCas7-11b | 195 | cttgaagactaaaggaaggaattaatg | 196 | CGCCAATATAACAATACAG |
| non-targeting | | tcacggtac | | GTATTATAGTTG |
| crRNA | | | | |
| MS2 crRNA | 197 | GTTGGAAAGCCGGTTTTCTTT | 198 | CTTTGTTGTCTTCGACATGG |
| DR length | | GATGTCACGGAAC | | GTAATCCTCAT |
| MS2 crRNA | 199 | GGAAAGCCGGTTTTCTTTGAT | 200 | CTTTGTTGTCTTCGACATGG |
| DR length | | GTCACGGAAC | | GTAATCCTCAT |
| MS2 crRNA | 201 | AAGCCGGTTTTCTTTGATGTC | 202 | CTTTGTTGTCTTCGACATGG |
| DR length | | ACGGAAC | | GTAATCCTCAT |
| MS2 crRNA | 203 | CCGGTTTTCTTTGATGTCACG | 204 | CTTTGTTGTCTTCGACATGG |
| DR length | | GAAC | | GTAATCCTCAT |
| MS2 crRNA | 205 | GTTTTCTTTGATGTCACGGAA | 206 | CTTTGTTGTCTTCGACATGG |
| DR length | | C | | GTAATCCTCAT |
| MS2 crRNA | 207 | TCTTTGATGTCACGGAAC | 208 | CTTTGTTGTCTTCGACATGG |
| DR length | | | | GTAATCCTCAT |
| MS2 crRNA | 209 | TTGATGTCACGGAAC | 210 | CTTTGTTGTCTTCGACATGG |
| DR length | | | | GTAATCCTCAT |
| MS2 crRNA | 211 | ATGTCACGGAAC | 212 | CTTTGTTGTCTTCGACATGG |
| DR length | | | | GTAATCCTCAT |
| MS2 crRNA | 213 | TCACGGAAC | 214 | CTTTGTTGTCTTCGACATGG |
| DR length | | | | GTAATCCTCAT |
| MS2 crRNA | 215 | CGGAAC | 216 | CTTTGTTGTCTTCGACATGG |
| DR length | | | | GTAATCCTCAT |
| MS2 crRNA | 217 | GGTTGGAAAGCCGGTTTTCTT | 218 | CTTTGTTGTCTTCGACATGG |
| spacer length | | TGATGTCACGGAAC | | GTAATCCTCA |
| MS2 crRNA | 219 | GGTTGGAAAGCCGGTTTTCTT | 220 | CTTTGTTGTCTTCGACATGG |
| spacer length | | TGATGTCACGGAAC | | GTAATCCT |
| MS2 crRNA | 221 | GGTTGGAAAGCCGGTTTTCTT | 222 | CTTTGTTGTCTTCGACATGG |
| spacer length | | TGATGTCACGGAAC | | GTAAT |
| MS2 crRNA | 223 | GGTTGGAAAGCCGGTTTTCTT | 224 | CTTTGTTGTCTTCGACATGG |
| spacer length | | TGATGTCACGGAAC | | GT |
| MS2 crRNA | 225 | GGTTGGAAAGCCGGTTTTCTT | 226 | CTTTGTTGTCTTCGACATG |
| spacer length | | TGATGTCACGGAAC | | |
| MS2 crRNA | 227 | GGTTGGAAAGCCGGTTTTCTT | 228 | CTTTGTTGTCTTCGAC |
| spacer length | | TGATGTCACGGAAC | | |
| MS2 crRNA | 229 | GGTTGGAAAGCCGGTTTTCTT | 230 | CTTTGTTGTCTTC |
| spacer length | | TGATGTCACGGAAC | | |
| MS2 crRNA | 231 | GGTTGGAAAGCCGGTTTTCTT | 232 | CTTTGTTGTC |
| spacer length | | TGATGTCACGGAAC | | |
| MS2 crRNA | 233 | TTGATGTCACGGAAC | 234 | CTTTGTTGTCTTCGACATGG |
| 1 DR WT | | | | GTAATCCTCAT |
| MS2 crRNA | 235 | ATGATGTCACGGAAC | 236 | CTTTGTTGTCTTCGACATGG |
| 1 DR mutant | | | | GTAATCCTCAT |
| 1 | | | | |
| MS2 crRNA | 237 | TAGATGTCACGGAAC | 238 | CTTTGTTGTCTTCGACATGG |
| 1 DR mutant | | | | GTAATCCTCAT |
| 2 | | | | |
| MS2 crRNA | 239 | TTCATGTCACGGAAC | 240 | CTTTGTTGTCTTCGACATGG |
| 1 DR mutant | | | | GTAATCCTCAT |
| 3 | | | | |
| MS2 crRNA | 241 | TTGTTGTCACGGAAC | 242 | CTTTGTTGTCTTCGACATGG |
| 1 DR mutant | | | | GTAATCCTCAT |
| 4 | | | | |
| MS2 crRNA | 243 | TTGAAGTCACGGAAC | 244 | CTTTGTTGTCTTCGACATGG |
| 1 DR mutant | | | | GTAATCCTCAT |
| 5 | | | | |
| MS2 crRNA | 245 | TTGATCTCACGGAAC | 246 | CTTTGTTGTCTTCGACATGG |
| 1 DR mutant | | | | GTAATCCTCAT |
| 6 | | | | |
| MS2 crRNA | 247 | TTGATGACACGGAAC | 248 | CTTTGTTGTCTTCGACATGG |
| 1 DR mutant | | | | GTAATCCTCAT |
| 7 | | | | |
| MS2 crRNA | 249 | TTGATGTGACGGAAC | 250 | CTTTGTTGTCTTCGACATGG |
| 1 DR mutant | | | | GTAATCCTCAT |
| 8 | | | | |
| MS2 crRNA | 251 | TTGATGTCTCGGAAC | 252 | CTTTGTTGTCTTCGACATGG |
| 1 DR mutant | | | | GTAATCCTCAT |
| 9 | | | | |
| MS2 crRNA | 253 | TTGATGTCAGGGAAC | 254 | CTTTGTTGTCTTCGACATGG |
| 1 DR mutant | | | | GTAATCCTCAT |
| 10 | | | | |
| MS2 crRNA | 255 | TTGATGTCACCGAAC | 256 | CTTTGTTGTCTTCGACATGG |
| 1 DR mutant | | | | GTAATCCTCAT |
| 11 | | | | |
| MS2 crRNA | 257 | TTGATGTCACGCAAC | 258 | CTTTGTTGTCTTCGACATGG |
| 1 DR mutant | | | | GTAATCCTCAT |
| 12 | | | | |
| MS2 crRNA | 259 | TTGATGTCACGGTAC | 260 | CTTTGTTGTCTTCGACATGG |
| 1 DR mutant | | | | GTAATCCTCAT |
| 13 | | | | |
| MS2 crRNA | 261 | TTGATGTCACGGATC | 262 | CTTTGTTGTCTTCGACATGG |
| 1 DR mutant | | | | GTAATCCTCAT |
| 14 | | | | |
| MS2 crRNA | 263 | TTGATGTCACGGAAG | 264 | CTTTGTTGTCTTCGACATGG |
| 1 DR mutant | | | | GTAATCCTCAT |
| 15 | | | | |
| MS2 crRNA | 265 | TTGATGTCACGGAAC | 266 | CTTTGTTGTCTTCGACATGG |
| 1 DR WT | | | | GTAATCCTCAT |
| MS2 crRNA | 267 | AAGATGTCACGGAAC | 268 | CTTTGTTGTCTTCGACATGG |
| 1 DR double | | | | GTAATCCTCAT |
| mutant 1 | | | | |
| MS2 crRNA | 269 | TACATGTCACGGAAC | 270 | CTTTGTTGTCTTCGACATGG |
| 1 DR double | | | | GTAATCCTCAT |
| mutant 2 | | | | |
| MS2 crRNA | 271 | TTCTTGTCACGGAAC | 272 | CTTTGTTGTCTTCGACATGG |
| 1 DR double | | | | GTAATCCTCAT |
| mutant 3 | | | | |
| MS2 crRNA | 273 | TTGTAGTCACGGAAC | 274 | CTTTGTTGTCTTCGACATGG |
| 1 DR double | | | | GTAATCCTCAT |
| mutant 4 | | | | |
| MS2 crRNA | 275 | TTGAACTCACGGAAC | 276 | CTTTGTTGTCTTCGACATGG |
| 1 DR double | | | | GTAATCCTCAT |
| mutant 5 | | | | |
| MS2 crRNA | 277 | TTGATCACACGGAAC | 278 | CTTTGTTGTCTTCGACATGG |
| 1 DR double | | | | GTAATCCTCAT |
| mutant 6 | | | | |
| MS2 crRNA | 279 | TTGATGAGACGGAAC | 280 | CTTTGTTGTCTTCGACATGG |
| 1 DR double | | | | GTAATCCTCAT |
| mutant 7 | | | | |
| MS2 crRNA | 281 | TTGATGTGTCGGAAC | 282 | CTTTGTTGTCTTCGACATGG |
| 1 DR double | | | | GTAATCCTCAT |
| mutant 8 | | | | |
| MS2 crRNA | 283 | TTGATGTCTGGGAAC | 284 | CTTTGTTGTCTTCGACATGG |
| 1 DR double | | | | GTAATCCTCAT |
| mutant 9 | | | | |
| MS2 crRNA | 285 | TTGATGTCAGCGAAC | 286 | CTTTGTTGTCTTCGACATGG |
| 1 DR double | | | | GTAATCCTCAT |
| mutant 10 | | | | |
| MS2 crRNA | 287 | TTGATGTCACCCAAC | 288 | CTTTGTTGTCTTCGACATGG |
| 1 DR double | | | | GTAATCCTCAT |
| mutant 11 | | | | |
| MS2 crRNA | 289 | TTGATGTCACGCTAC | 290 | CTTTGTTGTCTTCGACATGG |
| 1 DR double | | | | GTAATCCTCAT |
| mutant 12 | | | | |
| MS2 crRNA | 291 | TTGATGTCACGGTTC | 292 | CTTTGTTGTCTTCGACATGG |
| 1 DR double | | | | GTAATCCTCAT |
| mutant 13 | | | | |
| MS2 crRNA | 293 | TTGATGTCACGGATG | 294 | CTTTGTTGTCTTCGACATGG |
| 1 DR double | | | | GTAATCCTCAT |
| mutant 14 | | | | |
| COVID-19 N | 295 | GGTTGGAAAGCCGGTTTTCTT | 296 | ACCAAACGTAATGCGGGGT |
| gene crRNA | | TGATGTCACGGAAC | | GCATTTCGCTGA |
| 1 | | | | |
| COVID-19 N | 297 | GGTTGGAAAGCCGGTTTTCTT | 298 | GTTGAATCTGAGGGTCCACC |
| gene crRNA | | TGATGTCACGGAAC | | AAACGTAATGC |
| 2 | | | | |
| COVID-19 N | 299 | GGTTGGAAAGCCGGTTTTCTT | 300 | CATTCTGGTTACTGCCAGTT |
| gene crRNA | | TGATGTCACGGAAC | | GAATCTGAGGG |
| 3 | | | | |
| COVID-19 N | 301 | GGTTGGAAAGCCGGTTTTCTT | 302 | GCCCCACTGCGTTCTCCATT |
| gene crRNA | | TGATGTCACGGAAC | | CTGGTTACTGC |
| 4 | | | | |
| COVID-19 N | 303 | GGTTGGAAAGCCGGTTTTCTT | 304 | ACGTTGTTTTGATCGCGCCC |
| gene crRNA | | TGATGTCACGGAAC | | CACTGCGTTCT |
| 5 | | | | |
| COVID-19 N | 305 | GGTTGGAAAGCCGGTTTTCTT | 306 | GGTAAACCTTGGGGCCGAC |
| gene crRNA | | TGATGTCACGGAAC | | GTTGTTTTGATC |
| 6 | | | | |
| COVID-19 N | 307 | GGTTGGAAAGCCGGTTTTCTT | 308 | AGACGCAGTATTATTGGGT |
| gene crRNA | | TGATGTCACGGAAC | | AAACCTTGGGGC |
| 7 | | | | |
| COVID-19 N | 309 | GGTTGGAAAGCCGGTTTTCTT | 310 | TGAGAGCGGTGAACCAAGA |
| gene crRNA | | TGATGTCACGGAAC | | CGCAGTATTATT |
| 8 | | | | |
| Influenza A | 311 | GGTTGGAAAGCCGGTTTTCTT | 312 | CCGGGAAGTTTTTGAGCGA |
| segment 4 | | TGATGTCACGGAAC | | AAACCAGACATA |
| HA gene | | | | |
| crRNA 1 | | | | |
| Influenza A | 313 | GGTTGGAAAGCCGGTTTTCTT | 314 | CGTGCTGTTGTCATTTCCGG |
| segment 4 | | TGATGTCACGGAAC | | GAAGTTTTTGA |
| HA gene | | | | |
| crRNA 2 | | | | |
| Influenza A | 315 | GGTTGGAAAGCCGGTTTTCTT | 316 | CAAGGCACAGCGTTGCCGT |
| segment 4 | | TGATGTCACGGAAC | | GCTGTTGTCATT |
| HA gene | | | | |
| crRNA 3 | | | | |
| Influenza A | 317 | GGTTGGAAAGCCGGTTTTCTT | 318 | GGTACTGCATGGTGCCCAA |
| segment 4 | | TGATGTCACGGAAC | | GGCACAGCGTTG |
| HA gene | | | | |
| crRNA 4 | | | | |
| Influenza A | 319 | GGTTGGAAAGCCGGTTTTCTT | 320 | TCACTATCGTTCCGTTTGGT |
| segment 4 | | TGATGTCACGGAAC | | ACTGCATGGTG |
| HA gene | | | | |
| crRNA 5 | | | | |
| Influenza A | 321 | GGTTGGAAAGCCGGTTTTCTT | 322 | GTCATTCGTGATTGTTTTCA |
| segment 4 | | TGATGTCACGGAAC | | CTATCGTTCCG |
| HA gene | | | | |
| crRNA 6 | | | | |
| Influenza A | 323 | GGTTGGAAAGCCGGTTTTCTT | 324 | AGTGACTTCAATTTGGTCAT |
| segment 4 | | TGATGTCACGGAAC | | TCGTGATTGTT |
| HA gene | | | | |
| crRNA 7 | | | | |
| Influenza A | 325 | GGTTGGAAAGCCGGTTTTCTT | 326 | ACCAGTTCAGTAGCATTAGT |
| segment 4 | | TGATGTCACGGAAC | | GACTTCAATTT |
| HA gene | | | | |
| crRNA 8 | | | | |
| EGFP guide | 327 | GGTTGGAAAGCCGGTTTTCTT | 328 | TGGGGTGCAGGTGCTCCAC |
| 12 | | TGATGTCACGGAAC | | GGTGGCGTTGCT |
| EGFP guide | 329 | GGTTGGAAAGCCGGTTTTCTT | 330 | AAGGTGCGGGCGAAGCTGC |
| 13 | | TGATGTCACGGAAC | | CCACCAGCACGT |
| EGFP guide | 331 | GGTTGGAAAGCCGGTTTTCTT | 332 | GTCCACCACGAAGCTGTAG |
| 14 | | TGATGTCACGGAAC | | TAGCCGCCGTCG |
| EGFP guide | 333 | GGTTGGAAAGCCGGTTTTCTT | 334 | TGCTGGGGTGGATGGCGCT |
| 15 | | TGATGTCACGGAAC | | CTTGAAGTGCAT |
| EGFP guide | 335 | GGTTGGAAAGCCGGTTTTCTT | 336 | GGAAGGCGAACATGGGGCC |
| 16 | | TGATGTCACGGAAC | | CCCGTTCTGCAG |
| MS2 tiling | 337 | GGTTGGAAAGCCGGTTTTCTT | 338 | AATCCTCATGTTTGAATGGC |
| guide 1 | | TGATGTCACGGAAC | | CGGCGTCTATT |
| MS2 tiling | 339 | GGTTGGAAAGCCGGTTTTCTT | 340 | GGTAATCCTCATGTTTGAAT |
| guide 2 | | TGATGTCACGGAAC | | GGCCGGCGTCT |
| MS2 tiling | 341 | GGTTGGAAAGCCGGTTTTCTT | 342 | ATGGGTAATCCTCATGTTTG |
| guide 3 | | TGATGTCACGGAAC | | AATGGCCGGCG |
| MS2 tiling | 343 | GGTTGGAAAGCCGGTTTTCTT | 344 | GACATGGGTAATCCTCATGT |
| guide 4 | | TGATGTCACGGAAC | | TTGAATGGCCG |
| MS2 tiling | 345 | GGTTGGAAAGCCGGTTTTCTT | 346 | TTCGACATGGGTAATCCTCA |
| guide 5 | | TGATGTCACGGAAC | | TGTTTGAATGG |
| MS2 tiling | 347 | GGTTGGAAAGCCGGTTTTCTT | 348 | GTCTTCGACATGGGTAATCC |
| guide 6 | | TGATGTCACGGAAC | | TCATGTTTGAA |
| MS2 tiling | 349 | GGTTGGAAAGCCGGTTTTCTT | 350 | GTTGTCTTCGACATGGGTAA |
| guide 7 | | TGATGTCACGGAAC | | TCCTCATGTTT |
| MS2 tiling | 351 | GGTTGGAAAGCCGGTTTTCTT | 352 | TTTGTTGTCTTCGACATGGG |
| guide 8 | | TGATGTCACGGAAC | | TAATCCTCATG |
| MS2 tiling | 353 | GGTTGGAAAGCCGGTTTTCTT | 354 | TTCTTTGTTGTCTTCGACAT |
| guide 9 | | TGATGTCACGGAAC | | GGGTAATCCTC |
| MS2 tiling | 355 | GGTTGGAAAGCCGGTTTTCTT | 356 | AACTTCTTTGTTGTCTTCGA |
| guide 10 | | TGATGTCACGGAAC | | CATGGGTAATC |
| Cjc MS2 | 357 | CTTGAAGACTAAAGGAAGGA | 358 | AATCCTCATGTTTGAATGGC |
| 60 bp ssRNA | | ATTAATGTCACGGTAC | | CGGCGTCTATT |
| crRNA 1 | | | | |
| Cjc MS2 | 359 | CTTGAAGACTAAAGGAAGGA | 360 | GGTAATCCTCATGTTTGAAT |
| 60 bp ssRNA | | ATTAATGTCACGGTAC | | GGCCGGCGTCT |
| crRNA 2 | | | | |
| Cjc MS2 | 361 | CTTGAAGACTAAAGGAAGGA | 362 | ATGGGTAATCCTCATGTTTG |
| 60 bp ssRNA | | ATTAATGTCACGGTAC | | AATGGCCGGCG |
| crRNA 3 | | | | |
| Cjc MS2 | 363 | CTTGAAGACTAAAGGAAGGA | 364 | GACATGGGTAATCCTCATGT |
| 60 bp ssRNA | | ATTAATGTCACGGTAC | | TTGAATGGCCG |
| crRNA 4 | | | | |
| Cjc MS2 | 365 | CTTGAAGACTAAAGGAAGGA | 366 | TTCGACATGGGTAATCCTCA |
| 60 bp ssRNA | | ATTAATGTCACGGTAC | | TGTTTGAATGG |
| crRNA 5 | | | | |
| Cjc MS2 | 367 | CTTGAAGACTAAAGGAAGGA | 368 | GTCTTCGACATGGGTAATCC |
| 60 bp ssRNA | | ATTAATGTCACGGTAC | | TCATGTTTGAA |
| crRNA 6 | | | | |
| Cjc MS2 | 369 | CTTGAAGACTAAAGGAAGGA | 370 | GTTGTCTTCGACATGGGTAA |
| 60 bp ssRNA | | ATTAATGTCACGGTAC | | TCCTCATGTTT |
| crRNA 7 | | | | |
| Cjc MS2 | 371 | CTTGAAGACTAAAGGAAGGA | 372 | TTTGTTGTCTTCGACATGGG |
| 60 bp ssRNA | | ATTAATGTCACGGTAC | | TAATCCTCATG |
| crRNA 8 | | | | |
| Cjc MS2 | 373 | CTTGAAGACTAAAGGAAGGA | 374 | TTCTTTGTTGTCTTCGACAT |
| 60 bp ssRNA | | ATTAATGTCACGGTAC | | GGGTAATCCTC |
| crRNA 9 | | | | |
| Cjc MS2 | 375 | CTTGAAGACTAAAGGAAGGA | 376 | AACTTCTTTGTTGTCTTCGA |
| 60 bp ssRNA | | ATTAATGTCACGGTAC | | CATGGGTAATC |
| crRNA 10 | | | | |
| Cjc MS2 | 377 | CTTGAAGACTAAAGGAAGGA | 378 | TTGAACTTCTTTGTTGTCTTC |
| 60 bp ssRNA | | ATTAATGTCACGGTAC | | GACATGGGTA |
| crRNA 11 | | | | |
| Gw MS2 | 379 | GTTTGGAAGCCGGGTCGAAG | 380 | AAACGTAATGCGGGGTGCA |
| 60 bp ssRNA | | TCAGGCCCGTTAAGAC | | TTTCGCTGATTT |
| crRNA 1 | | | | |
| Gw MS2 | 381 | GTTTGGAAGCCGGGTCGAAG | 382 | ACCAAACGTAATGCGGGGT |
| 60 bp ssRNA | | TCAGGCCCGTTAAGAC | | GCATTTCGCTGA |
| crRNA 2 | | | | |
| Gw MS2 | 383 | GTTTGGAAGCCGGGTCGAAG | 384 | TCCACCAAACGTAATGCGG |
| 60 bp ssRNA | | TCAGGCCCGTTAAGAC | | GGTGCATTTCGC |
| crRNA 3 | | | | |
| Gw MS2 | 385 | GTTTGGAAGCCGGGTCGAAG | 386 | GGGTCCACCAAACGTAATG |
| 60 bp ssRNA | | TCAGGCCCGTTAAGAC | | CGGGGTGCATTT |
| crRNA 4 | | | | |
| Gw MS2 | 387 | GTTTGGAAGCCGGGTCGAAG | 388 | TGAGGGTCCACCAAACGTA |
| 60bp ssRNA | | TCAGGCCCGTTAAGAC | | ATGCGGGGTGCA |
| crRNA 5 | | | | |
| Gw MS2 | 389 | GTTTGGAAGCCGGGTCGAAG | 390 | ATCTGAGGGTCCACCAAAC |
| 60bp ssRNA | | TCAGGCCCGTTAAGAC | | GTAATGCGGGGT |
| crRNA 6 | | | | |
| Gw MS2 | 391 | GTTTGGAAGCCGGGTCGAAG | 392 | TGAATCTGAGGGTCCACCA |
| 60 bp ssRNA | | TCAGGCCCGTTAAGAC | | AACGTAATGCGG |
| crRNA 7 | | | | |
| Gw MS2 | 393 | GTTTGGAAGCCGGGTCGAAG | 394 | AGTTGAATCTGAGGGTCCA |
| 60 bp ssRNA | | TCAGGCCCGTTAAGAC | | CCAAACGTAATG |
| crRNA 8 | | | | |
| Gw MS2 | 395 | GTTTGGAAGCCGGGTCGAAG | 396 | GCCAGTTGAATCTGAGGGT |
| 60 bp ssRNA | | TCAGGCCCGTTAAGAC | | CCACCAAACGTA |
| crRNA 9 | | | | |
| Gw MS2 | 397 | GTTTGGAAGCCGGGTCGAAG | 398 | ACTGCCAGTTGAATCTGAG |
| 60 bp ssRNA | | TCAGGCCCGTTAAGAC | | GGTCCACCAAAC |
| crRNA 10 | | | | |
| Gw MS2 | 399 | GTTTGGAAGCCGGGTCGAAG | 400 | GTTACTGCCAGTTGAATCTG |
| 60 bp ssRNA | | TCAGGCCCGTTAAGAC | | AGGGTCCACCA |
| crRNA 11 | | | | |

[0316] Table 7 below shows examples of mammalian plasmids.

TABLE 7

| Plasmid | | |
|---|---|---|
| number | Name | Benchling link |
| pDF0158 | pCMV-huDsiGRAMP N term | https://benchling.com/s/seq- |
| | msfGFP mammalian | 16V8YUC36yaVMw4GYawz |
| | expression | |
| pDF0159 | pCMV-huDsiGRAMP | https://benchling.com/s/seq- |
| | mammalian expression | V4NVwiioQSHLp6fIcKY5I |
| pDF0160 | pCMV-huDsiGRAMP C term | https://benchling.com/s/seq- |
| | msfGFP mammalian | 6KYYZvPGjqOWNIPwLN2u |
| | expression | |
| pDF0113 | pU6-Eco31i-Eco31i-DsiCas7- | https://benchling.com/s/seq- |
| | 11a full DR guide scaffold | fl07Vm8NmTi2ydJnbZGS |
| | with golden gate site | |
| pDF0114 | pU6-Eco31i-Eco31i-DsiCas7- | https://benchling.com/s/seq- |
| | 11a mature DR guide scaffold | 22EWyWJAvvfpX2EsdJxs |
| | with golden gate site | |
| pDF0111 | CMV-Cluciferase(STOP85)- | https://benchling.com/s/seq- |
| | polyA EF1a-G-luciferase- | 9fEQxFBZrIEQo8Ta407A |
| | polyA (pAB0040) | |
| pDF0112 | CMV-Cluciferase-polyA EF1a- | https://benchling.com/s/seq- |
| | G-luciferase-polyA | QDT25JIo4luxluesN196 |
| pDF0234 | pCMV-huDsiGRAMP (5′ | https://benchling.com/s/seq- |
| | UTR from BE constructs) dead | cNh2lgwflmDV66VanySf |
| | mutant | |
| pDF0237 | pCMV-dead huDsiGRAMP- | https://benchling.com/s/seq- |
| | NES-huADAR2 | OKxBeGoAOWuk6GbgfAa2 |
| pDF0228 | pCMV-huDsiGRAMP-NES- | https://benchling.com/s/seq- |
| | huADAR2 | BnKsJ4pko0RcknikJMlr |

[0317] Table 8 below shows examples of Cas7-11 guides for mammalian.

TABLE 8

| SEQ | | | | Application |
|---|---|---|---|---|
| ID NO | Name | Spacer sequence | Target | (Knockdown/editing) |
| 401 | DsiGRAMP mammalian Gluc | GCAGATCAGGGCAAACAGA | Gluc | Knockdown |
| | guide 1 F | ACTTTGACTCCC | | |
| 402 | DsiGRAMP mammalian Gluc | CGATGTTGAAGTCTTCGTT | Gluc | Knockdown |
| | guide 2 F | GTTCTCGGTGGG | | |
| 403 | DsiGRAMP mammalian Gluc | GCAACTTCCCGCGGTCAGC | Gluc | Knockdown |
| | guide 3 F | ATCGAGATCCGT | | |
| 404 | DsiGRAMP mammalian Gluc | TGCAGCCAGCTTTCCGGGC | Gluc | Knockdown |
| | guide 4 F | ATTGGCTTCCAT | | |
| 405 | DsiGRAMP mammalian Gluc | TGAACTTCTTCATCTTGGG | Gluc | Knockdown |
| | guide 5 F | CGTGCACTTGAT | | |
| 406 | DsiGRAMP mammalian Gluc | GAATGTCGACGATCGCCTC | Gluc | Knockdown |
| | guide 6 F | GCCTATGCCGCC | | |
| 407 | DsiGRAMP mammalian Gluc | ATGAACTGCTCCATGGGCT | Gluc | Knockdown |
| | guide 7 F | CCAAGTCCTTGA | | |
| 408 | DsiGRAMP mammalian Gluc | GCAGCCAGTTGTGCAGTCC | Gluc | Knockdown |
| | guide 8 F | ACACACAGATCG | | |
| 409 | DsiGRAMP mammalian Gluc | GCGTTGCGGCAGCCACTTC | Gluc | Knockdown |
| | guide 9 F | TTGAGCAGGTCA | | |
| 410 | DsiGRAMP mammalian Gluc | TGTCCACCTGGCCCTGGAT | Gluc | Knockdown |
| | guide 10 F | CTTGCTGGCAAA | | |
| 411 | DsiGRAMP mammalian | GGTAATGCCTGGCTTGTCG | Gluc | Knockdown |
| | Non-targeting 1 F | ACGCATAGTCTG | | |
| 412 | DsiGRAMP mammalian | GGGAACCTTGGCCGTTATA | Gluc | Knockdown |
| | Non-targeting 2 F | AAGTCTGACCAG | | |
| 413 | KRAS guide 1 | TATAATGGTGAATATCTTC | KRAS | Knockdown |
| | | AAATGATTTAGT | | |
| 414 | KRAS guide 2 | ATGTATAGAAGGCATCATC | KRAS | Knockdown |
| | | AACACCCTGTCT | | |
| 415 | KRAS guide 3 | GGTTAAAAATTTACAGATT | KRAS | Knockdown |
| | | GTGCTGAGCTTG | | |
| 416 | PPIB guide 1 | GTAGATGCTCTTTCCTCCT | PPM | Knockdown |
| | | GTGCCATCTCCC | | |
| 417 | PPIB guide 2 | CAGTTTGAAGTTCTCATCG | PPM | Knockdown |
| | | GGGAAGCGCTCA | | |
| 418 | PPIB guide 3 | CAGTGTTGGTAGGAGTTTG | PPM | Knockdown |
| | | TTACAAAAGTGA | | |
| 419 | MALAT1 guide 1 | CTTGGCCAAGTCTGTTATG | MALAT1 | Knockdown |
| | | TTCACCTGAAAA | | |
| 420 | MALAT1 guide 2 | CAAAATGTACTCAGCTTCA | MALAT1 | Knockdown |
| | | ATCACAAATACG | | |
| 421 | MALAT1 guide 3 | GGTTATAGCTTGACAAGCA | MALAT1 | Knockdown |
| | | ATTAACTTTAAA | | |
| 422 | CXCR4 guide 1 | ATGATAATGCAATAGCAGG | CXCR4 | Knockdown |
| | | ACAGGATGACAA | | |
| 423 | Non-targeting 1 | GGTAATGCCTGGCTTGTCG | — | Knockdown |
| | | ACGCATAGTCTG | | |
| 424 | Non-targeting 2 | GGGAACCTTGGCCGTTATA | — | Knockdown |
| | | AAGTCTGACCAG | | |
| 425 | Cluc W85X guide MAM1 | CATCCTGCGGCCTCTACTC | Cluc | Editing |
| | | TGCATTCAATTACATACTG | | |
| | | ACACATTCGGCA | | |
| 426 | Cluc W85X guide MAM3 | ACCATCCTGCGGCCTCTAC | Cluc | Editing |
| | | TCTGCATTCAATTACATAC | | |
| | | TGACACATTCGG | | |
| 427 | Cluc W85X guide MM5 | AAACCATCCTGCGGCCTCT | Cluc | Editing |
| | | ACTCTGCATTCAATTACAT | | |
| | | ACTGACACATTC | | |
| 428 | Cluc W85X guide MM7 | CTAAACCATCCTGCGGCCT | Cluc | Editing |
| | | CTACTCTGCATTCAATTAC | | |
| | | ATACTGACACAT | | |
| 429 | Cluc W85X guide MAM9 | TTCTAAACCATCCTGCGGC | Cluc | Editing |
| | | CTCTACTCTGCATTCAATT | | |
| | | ACATACTGACAC | | |
| 430 | Cluc W85X guide MAM11 | TGTTCTAAACCATCCTGCG | Cluc | Editing |
| | | GCCTCTACTCTGCATTCAA | | |
| | | TTACATACTGAC | | |
| 431 | Cluc W85X guide MAM13 | AATGTTCTAAACCATCCTG | Cluc | Editing |
| | | CGGCCTCTACTCTGCATTC | | |
| | | AATTACATACTG | | |
| 432 | Cluc W85X guide MAM15 | AGAATGTTCTAAACCATCC | Cluc | Editing |
| | | TGCGGCCTCTACTCTGCAT | | |
| | | TCAATTACATAC | | |
| 433 | Cluc W85X guide MAM17 | ATAGAATGTTCTAAACCAT | Cluc | Editing |
| | | CCTGCGGCCTCTACTCTGC | | |
| | | ATTCAATTACAT | | |
| 434 | Cluc W85X guide MAM19 | CCATAGAATGTTCTAAACC | Cluc | Editing |
| | | ATCCTGCGGCCTCTACTCT | | |
| | | GCATTCAATTAC | | |
| 435 | Cluc W85X guide MM21 | TTCCATAGAATGTTCTAAA | Cluc | Editing |
| | | CCATCCTGCGGCCTCTACT | | |
| | | CTGCATTCAATT | | |
| 436 | Cluc W85X guide MM23 | CTTTCCATAGAATGTTCTA | Cluc | Editing |
| | | AACCATCCTGCGGCCTCTA | | |
| | | CTCTGCATTCAA | | |
| 437 | Cluc W85X guide MM25 | CTCTTTCCATAGAATGTTC | Cluc | Editing |
| | | TAAACCATCCTGCGGCCTC | | |
| | | TACTCTGCATTC | | |
| 438 | Cluc W85X guide MM27 | ATCTCTTTCCATAGAATGT | Cluc | Editing |
| | | TCTAAACCATCCTGCGGCC | | |
| | | TCTACTCTGCAT | | |
| 439 | Cluc W85X guide MM29 | GAATCTCTTTCCATAGAAT | Cluc | Editing |
| | | GTTCTAAACCATCCTGCGG | | |
| | | CCTCTACTCTGC | | |
| 440 | Cluc W85X guide MM31 | TGGAATCTCTTTCCATAGA | Cluc | Editing |
| | | ATGTTCTAAACCATCCTGC | | |
| | | GGCCTCTACTCT | | |
| 441 | Cluc W85X guide MAM33 | ACTGGAATCTCTTTCCATA | Cluc | Editing |
| | | GAATGTTCTAAACCATCCT | | |
| | | GCGGCCTCTACT | | |
| 442 | Cluc W85X guide MM35 | GAACTGGAATCTCTTTCCA | Cluc | Editing |
| | | TAGAATGTTCTAAACCATC | | |
| | | CTGCGGCCTCTA | | |
| 443 | Cluc W85X guide MM37 | TGGAACTGGAATCTCTTTC | Cluc | Editing |
| | | CATAGAATGTTCTAAACCA | | |
| | | TCCTGCGGCCTC | | |
| 444 | Cluc W85X guide MM39 | CCTGGAACTGGAATCTCTT | Cluc | Editing |
| | | TCCATAGAATGTTCTAAAC | | |
| | | CATCCTGCGGCC | | |
| 445 | Cluc W85X guide MM41 | TTCCTGGAACTGGAATCTC | Cluc | Editing |
| | | TTTCCATAGAATGTTCTAA | | |
| | | ACCATCCTGCGG | | |
| 446 | Cluc W85X guide MM43 | GGTTCCTGGAACTGGAATC | Cluc | Editing |
| | | TCTTTCCATAGAATGTTCT | | |
| | | AAACCATCCTGC | | |
| 447 | LwaCas13a guide | ACCCAGGAATCTCAGGAAT | Gluc | Knockdown |
| | for comparison | GTCGACGAT | | |
| 448 | PspCas13b guide | GGGCATTGGCTTCCATCTC | Gluc | Knockdown |
| | for comparison | TTTGAGCACCT | | |
| 449 | RfxCas13d guide | ACCCAGGAATCTCAGGAAT | Gluc | Knockdown |
| | for comparison | GTCGACGAT | | |
| 450 | shRNA guide for | AAAGTTCTGTTTGCCCTGA | Gluc | Knockdown |
| | comparison | TCCTCGAGGATCAGGGCAA | | |
| | | ACAGAACTTT | | |

[0318] Table 9 shows the representative Cas7-11 orthologs of FIG. 1F.

TABLE 9

| SEQ ID NO/ | |
|---|---|
| NAME | SEQUENCE |
| SEQ ID NO: 451 | RDMATSAHTTIDKETKRTKENHLINLEVVRIED |
| MBD3181016.1 | N-RYLKGSVEMIN- |
| SEQ ID NO: 452 | DQVRTSAHNKINRATGRVEKDLLFSYELG--AN |
| MBC8521845.1 | T-VPLEGTIERVNP |
| SEQ ID NO: 453 | DMVRTSTHNKISRATGRVEKDHLFSYELG--AN |
| RCV63412.1 | T-TPFEGMIEPVNH |
| SEQ ID NO: 454 | GTTRVSLHNRVDPTTGRVPEETFFSFEVG--SA |
| MBC8461765.1 | E-K-FTGRIERSGP |
| SEQ ID NO: 455 | EPIRISTHNRIDPATGRVPKDLLFTFEMG--SP |
| HHR29383 .1 | A-V-FRGYIERIGI |
| SEQ ID NO: 456 | LQIFLYTQARLDRPTRTAVPGALYSSEFG--LR |
| WP_129889723.1 | E-ITFKGSVTGWLE |
| SEQ ID NO: 457 | NQKDVYTQVRLDRPTRTAVEGALYTSEFG--TR |
| WP_174676620.1 | G-LTFHGDITGSLT |
| SEQ ID NO: 458 | LFLNTRTGTKIDRRTGTVQEDHLFTTESG--IK |
| TFH44231.1 | G-ITLTSKIYGRGN |
| SEQ ID NO: 459 | YGQSIRSNNRIDPKTRTAANDHLFFTECV--DP |
| MAT45258.1 | D-TYFIGEIRSSSN |
| SEQ ID NO: 460 | YGRLLRTGIGIDRKLRVVVPDRLFTNECV--GT |
| WP_075063448.1 | K-IPFTGRIIGEFP |
| SEQ ID NO: 461 | EIAVSRVVNRVDPNSGKA-KDFFRVWEID--HK |
| HreCas7-11 | LCPNFLGKMSISLS |
| SEQ ID NO: 462 | DIVQKRILNRVDQTCGKA-KDFFKVCEVD--HI |
| CmaCas7-11 | ACPTLNGIIRINDE |
| SEQ ID NO: 463 | ETAIERIVNRVDPSSGKA-KDYMRIWEID--PL |
| HvmCas7-11 | VCSQFNGIITIN-- |
| SEQ ID NO: 464 | EIGSRRTINRVDDETGKA-HDFFSIWEVD--A- |
| SmCas7-11 | -VREFQGEIVLAAD |
| SEQ ID NO: 465 | EIGRLRTLNRIDRLTTKA-QDFFRIYEVD--Q- |
| OmCas7-11 | -VRDFFGTITLAGD |
| SEQ ID NO: 466 | AIGSQRVLNRVDFKSGKA-HDFFKAYEVD--HT |
| DisCas7-11 | RFPRNEGEITIDNK |
| SEQ ID NO: 467 | EIAVRRVVNRVDYASGKA-HDFFRINEVD--HI |
| DsbaCas7-11 | AFPCFHGEIAFGEN |
| SEQ ID NO: 468 | DIGTQRTLNRVDYATGKA-HDFFKVWEID--HS |
| SstCas7-11 | LLSVFQGKISIADN |
| SEQ ID NO: 469 | DIASGRILNRVDFDTGKA-KDYFRTWEAD--YE |
| CsbCas7-11 | TYGTYTGRITLRNE |
| SEQ ID NO: 470 | DIASERILNRVDYTTGKA-HDYFKVWEVD--DD |
| CjeCas7-11 | QWWQFTGTITMHDD |
| SEQ ID NO: 471 | DVCKERVLNRVDFRTGKA-QDYFRVFEID--HE |
| CbfCas7-11 | DWGVYTGEITITEP |
| SEQ ID NO: 472 | ELAPKRALNRIEQYTGKA-QDYFTVYEAL--NK |
| HysCas7-11 | EFWTFKGRIRIKED |
| SEQ ID NO: 473 | EIG1RRILNRVDFTTGKA-QDYFYVWEVE--HS |
| HsmCas7-11 | MCPKFQGTVKINED |
| SEQ ID NO: 474 | DIAQKRTSNRVDFFSKKA-HDHYGVWEVT--A- |
| FmCas7-11 | -VKNLLGYIYISDA |
| SEQ ID NO: 475 | QKIRPRILNRMDPGTSKA-RDYFRVFEIE--NQ |
| DpbaCas7-11 | LCSQFRGWIWLSGD |

[0319] Table 10 shows the representative Cas7-11 orthologs of FIG. 1G.

TABLE 10

| SEQ ID NO/ | |
|---|---|
| NAME | SEQUENCE |
| SEQ ID NO: 476 | QRI----------------TPDAPDADP-YWQA |
| WmCas7x3 | DIALDADGRPYLPG |
| SEQ ID NO: 477 | EEMDKQSG-----------ESVDKKQNN-SWIQ |
| NasCas7x3 | AIALDLNKKPYIPG |
| SEQ ID NO: 478 | E------------------KERDENKET-RWLE |
| GwCas7x3 | AVALDHKGQPYIPG |
| SEQ ID NO: 479 | VTRP---------------ELTVADRDELVDIN |
| HvmCas7x3 | AVVTDYTGKPYLPG |
| SEQ ID NO: 480 | TDRPGLEI-----------EQKDGSKVK-AEIN |
| DsbCas7x3 | AFIKDSNGKPYLPG |
| SEQ ID NO: 481 | IPVT---I-----------KDTQGKNRE-VEVN |
| GamCas7x3 | SVITGKAALPIIPG |
| SEQ ID NO: 482 | VEHD---------------LIKNDDGTP-VQIN |
| DesCas7x3 | ALITGAGGLPIIPG |
| SEQ ID NO: 483 | AEIE---I-----------NDSQGDRRQ-VQAN |
| GabCas7x3 | AIIRGKDDKPIIPG |
| SEQ ID NO: 484 | CEHD---------------DVKNNDGEP-VKIN |
| MetCas7x3 | ACIKGSKGRPIIPG |
| SEQ ID NO: 485 | CYRP---------------ELTNADQKP-VDIN |
| MebCas7x3 | ACIKGANNLPIIPG |
| SEQ ID NO: 486 | -----------------EGQKQTDDQAE-SLHL |
| GwCas7-11 | RTLRDGGRGRIPF |
| SEQ ID NO: 487 | ----------------------SEGQTS----Q |
| HreCas7-11 | AIILCPDGSYRLPR |
| SEQ ID NO: 488 | ----------------------KTSHTR----S |
| CmaCas7-11 | TIFLNMNGQFCIPR |
| SEQ ID NO: 489 | ----------------------QEGQTS----A |
| HvmCas7-11 | TILLNRDGYFRLPR |
| SEQ ID NO: 490 | --------------------PIDDDQTS----S |
| SmCas7-11 | RTLVDRDGRYRLPR |
| SEQ ID NO: 491 | ---------------------GSHDHTS----R |
| OmCas7-11 | KILLTRDFYYRLPR |
| SEQ ID NO: 492 | ---------------------EDAKQTD----L |
| DisCas7-11 | QVLLTPDNKYRLPR |
| SEQ ID NO: 493 | ---------------------KEKKQTD----L |
| DsbaCas7-11 | MLLLDGQNHYRIPR |
| SEQ ID NO: 494 | ---------------------EDAKHTN----L |
| SstCas7-11 | KVLLDRQNRYRLPR |
| SEQ ID NO: 495 | ---------------------GAGGHTD----L |
| SybCas7-11 | SILLGKDGHYRVPR |
| SEQ ID NO: 496 | SDSIPGKEKP------KSEDSLVINEHTS---- |
| CsbCas7-11 | FNILLDKENRYRIPR |
| SEQ ID NO: 497 | FDSTQDDLDLVPDIVNTDEKLEANEQTS----F |
| CjcCas7-11 | RILMDKKGRYRIPR |
| SEQ ID NO: 498 | ------------------EQTEEVEHTS----L |
| CbfCas7-11 | RLVMDKKGRFRIPR |
| SEQ ID NO: 499 | ----------------------DEEKAE----G |
| HvsCas7-11 | AILLTPDNRFRLPR |
| SEQ ID NO: 500 | ---------------------KTEEQID----M |
| HsmCas7-11 | QILLTKDGRYRLPR |
| SEQ ID NO: 501 | ---------------------QAGKQTS----M |
| FmCas7-11 | PTLQDSNDHFRLPR |
| SEQ ID NO: 502 | ---------------------ATETHTD----L |
| DpbaCas7-11 | PILLTSDRHFRIPR |

[0320] Table 11 shows the representative Cas7-11 orthologs of FIG. 1H.

TABLE 11

| SEQ ID NO/ | |
|---|---|
| NAME | SEQUENCE |
| SEQ ID NO: 503 | HRKPQDNAPDGTPRQRGDRA------------- |
| WmCas7x3 | --LLPGASLRGRLRS |
| SEQ ID NO: 504 | KKDEAKNEADAKPRTNHQGQV------------ |
| NasCas7x3 | --ILPASSLRGRLRA |
| SEQ ID NO: 505 | KADDADAV----PRRTHDDKI------------ |
| GwCas7x3 | --VLPASSLRGRLRT |
| SEQ ID NO: 506 | KKKRRSNTPNLRPLRDAIGRP------------ |
| HvmCas7x3 | --CLPESSVRGALRA |
| SEQ ID NO: 507 | KKRKED--IDHQPLRDSAGNA------------ |
| DsbCas7x3 | --RLPAKSIRGAMRS |
| SEQ ID NO: 508 | DKCKAEDTPDIYPLEEKNGVP------------ |
| GamCas7x3 | --AFPVRSFRGAIRS |
| SEQ ID NO: 509 | NTPDITQAPDMVPLVDEDGNP------------ |
| DesCas7x3 | --MLPASSFRGALRA |
| SEQ ID NO: 510 | SKGDGDQPAVHQPLTDRSNNP------------ |
| GabCas7x3 | --ILPARSFRGAIRA |
| SEQ ID NO: 511 | LSSNENAKTDHYPLLDKNRNP------------ |
| MetCas7x3 | --YLPVSSFRGVLRS |
| SEQ ID NO: 512 | LEADPKTKIDHYPLLDNHKKP------------ |
| MebCas7x3 | --RLPSASIRGVLRS |
| SEQ ID NO: 513 | ESDAPDNVAYKKPVVQYDETGRLRTTDPGPVEM |
| GwCas7-11 | LTCLKGEGVRGVVAY |
| SEQ ID NO: 514 | DHDNKDAVMVQKTVLFVDESG------NYSQMP |
| HreCas7-11 | HHFLKGSGIRGACRF |
| SEQ ID NO: 515 | DNRNPDAVMVKKTILVYEQDSSTHKNVPKEVPK |
| CmaCas7-11 | Y-FIKSETIRGLLRS |
| SEQ ID NO: 516 | DPRNTDAIMVRKTVFCPDPNA---KNRPAPATV |
| HvmCas7-11 | Y-MIKGESIRGILRS |
| SEQ ID NO: 517 | NSDTADIISFRRTVVDNGEVL------REP--- |
| SmCas7-11 | --VLRGEGLRGLLRT |
| SEQ ID NO: 518 | -RHEEDSVYFQKRIFTSDGRV-----VLVP--- |
| OmCas7-11 | --ALRGEGLRGLLRT |
| SEQ ID NO: 519 | DKRGTDVVTFVKYKAEGEEAK------PVC--- |
| DisCas7-11 | --AYKAESFRGVIRS |
| SEQ ID NO: 520 | TEDVADIVSFKKYTQGGEKIIY----------- |
| DsbaCas7-11 | --AYKSESFRGVVRT |
| SEQ ID NO: 521 | EKDGSDIVSFRKYADDSGKEVY----------- |
| SstCas7-11 | --AYKAESFRGVVRA |
| SEQ ID NO: 522 | ERIGFDNIAYEKRRYNGETNT------TESIP- |
| SybCas7-11 | --AVKGETFRGIVRT |
| SEQ ID NO: 523 | EPGNRDAIAYKKRVYNDGNNA------IEPEPR |
| CsbCas7-11 | F-AVKSETHRGIFRT |
| SEQ ID NO: 524 | NKDNIDCIAYEKRKWENGGIK------FVP--- |
| CjcCas7-11 | --TIKGETIRGIVRM |
| SEQ ID NO: 525 | DPNNVDAIVFEKMKLDGDQVK------YLP--- |
| CbfCas7-11 | --AIKGETIRGIVRT |
| SEQ ID NO: 526 | EGKAPDAVFFKKYVFENGKIE------EKP--- |
| HvsCas7-11 | --CFKAESIRGIFRT |
| SEQ ID NO: 527 | DSSNTDLVTFKKYKLEESKEVF----------- |
| HsmCas7-11 | --AIKGESIRGVFRT |
| SEQ ID NO: 528 | -HGNTDSVFYKKPILKSGEKE------PSYQW- |
| FmCas7-11 | --AIKSDTVRGLIRS |
| SEQ ID NO: 529 | -RNESDAVFYQKSVAGEKGPVY----------- |
| DpbaCas7-11 | --ALKGEGLRGIVSS |

[0321] Table 12 shows the representative Cas7-11 orthologs of FIG. 1I.

TABLE 12

| SEQ ID NO/ | |
|---|---|
| NAME | SEQUENCE |
| SEQ ID NO: 530 | PATLVDHDMLAIDRFTGGGKDGAKFK----LRY |
| WmCas7x3 | AECP-TLEGQLSLDL |
| SEQ ID NO: 531 | LATLTRHEMVAIDRFTGGGKEGAKFN----VDY |
| NisCas7x3 | IECP-TLTGAIYLDL |
| SEQ ID NO: | SIKTRRHEMLAIDRFTGGGKDGAKFN----VDY |
| 442532 | VECP-TLAGKLSLDL |
| GwCas7x3 | |
| SEQ ID NO: 533 | EDCDNIQEFVAIDRFTGGAKDKAKFN----AEY |
| HymCas7x3 | IGSP-RFTGTIALDK |
| SEQ ID NO: 534 | TRQETVQDFVAIDRFHGGGKETAKFD----ASF |
| DsbCas7x3 | SWRP-QYSILMHIPS |
| SEQ ID NO: 535 | LKPFIIQEFVAIDRFHGGGKDEAKFN----AAH |
| GamCas7x3 | YQAP-VFKGKVRVSQ |
| SEQ ID NO: 536 | FRREQEQTFVAIDRFHGGCKEGALYT----IRH |
| DesCas7x3 | AESP-RFEGHLVIDP |
| SEQ ID NO: 537 | YRPAKTQQFVAIDRFHGGGKDGALFS----IKY |
| GabCas7x3 | FERP-VLKGGISLKL |
| SEQ ID NO: 538 | KSKKTKQDFVAIDRFHGGGKDGAKFD----ATH |
| MetCas7x3 | FERP-EFEGAISFSP |
| SEQ ID NO: 539 | ANELKTQEFIAIDRFHGGGKDGAKFN----AKH |
| MebCas7x3 | SERP-YFQGRITLSP |
| SEQ ID NO: 540 | TPHAMRSDRVALDVF-GGAMPEAKFDDRPLAAS |
| GwCas7-11 | PGKPLNFKSTIWYRE |
| SEQ ID NO: 541 | EVEAIKCDHVAIDRFHGGTVHRMKYDDYPLPGS |
| HreCas7-11 | PNRPLRIKGNIWVKR |
| SEQ ID NO: 542 | NVSDCCIDHVAIDRFTGGGVEKMKFNDYPLSAS |
| CmaCas7-11 | PKNCLNLKGSIWITS |
| SEQ ID NO: 543 | SVSDKKMDHVAIDRFTGGGVDQMKFDDYPLPGC |
| HvmCas7-11 | PAQPLILEGKFWVKD |
| SEQ ID NO: 544 | TVADKRLDHVAIDRFDQSVVE--KYDDRPLVGS |
| SmCas7-11 | PKQPLVFKGCFWVQT |
| SEQ ID NO: 545 | TWNDKKIDHVSCSRFDASVVN--KFDDRSLVGS |
| OmCas7-11 | PDSPLHEEGTFWLHR |
| SEQ ID NO: 4546 | DPEPVTFDHVAIDRFTGGAADKKKFDDSPLPGS |
| DisCas7-11 | PARPLMLKGSFWIRR |
| SEQ ID NO: 547 | EPEPRRFDHVAIDRFTGGAVNQKKFDDRSLVPG |
| DsbaCas7-11 | KEGFMTLIGCFWMRK |
| SEQ ID NO: 548 | QPEPMIFDHVAIDRFTGGAVDKKKFDDCSLPGT |
| SstCas7-11 | PGHPLTLKGCFWIRK |
| SEQ ID NO: 549 | AWTRKHLDHVAIDRFHGGAEENMKFDTYALAAS |
| SybCas7-11 | PTNPLRMKGLIWVRS |
| SEQ ID NO: 550 | EKLEKHIDHVAIDRFTGGALDKAKFDTYPLAGS |
| CsbCas7-11 | PKKPLKLKGRFWIKK |
| SEQ ID NO: 551 | SYKKKLIDHVAIDRFHGGAEDKMKFNTLPLAGS |
| CjeCas7-11 | FEKPIILKGRFWIKK |
| SEQ ID NO: 552 | KDIAKKIDHVAIDRFTGGARDQMKFDTLPLIGS |
| CbfCas7-11 | PERPLRLKGLFWMRR |
| SEQ ID NO: 553 | GQEEKFFDHVAIDRFLGGAKEKYKFDDKPIIGA |
| fivsCas7-11 | PDTPIVLEGKIWVKK |
| SEQ ID NO: 554 | DSAPKRLDHVAIDRFTGGAKEQAKFDDSPLIGS |
| HsmCas7-11 | PDSPLEFTGIVWVRD |
| SEQ ID NO: 555 | EIKTYRMDHVAIDRISGGAVDQCKYDDEPLVGT |
| FmCas7-11 | SKHPLVFKGMFWINR |
| SEQ ID NO: 556 | EVREKLFDHVSIDRFTGGAANKLKFDDKPLVG- |
| DpbaCas7-11 | --NPLVFQGVFWVHQ |

[0322] Table 13 shows the representative Cas7-11 orthologs of FIG. 1J.

TABLE 13

| SEQ ID NO\ | |
|---|---|
| NAME | SEQUENCE |
| SEQ ID NO: 557 | PVAGFALQNQPAIPATSLRGLLSSLFESISGSNL |
| WmCas7x3 | RVLHPTPYSIRKTT |
| SEQ ID NO: 558 | EARPFKLNGKHAIPATSLRGMLSSLFESVSNSNF |
| NisCas7x3 | RVLHPEHYSVRKSL |
| SEQ ID NO: 559 | SLHPFKLNNGLAIPATSLRGMISSLFESVSNSNF |
| GwCas7x3 | RVLDEKTYSMRKTM |
| SEQ ID NO: 560 | EILPFTLGGKPAIPATSLRGMLSSIAEAASNSSL |
| HvmCas7x3 | RVLEDKTLSYRKSM |
| SEQ ID NO: 561 | QVDHYTENGEIAIPATTLRGLLSSLSEAASNSSM |
| DsbCas7x3 | RVLDDGMNISYRQPV |
| SEQ ID NO: 562 | LRHPYQLDGEPAIPSTSLRGLISTMTEAAANCAM |
| GamCas7x3 | RVLDSEIISYRKPM |
| SEQ ID NO: 563 | RIENYRLGNRIAIPAASLRGMLSSLAEAASNSAM |
| DesCas7x3 | RVLHQGILSYRKKA |
| SEQ ID NO: 564 | LKEHYQLNNKLAIPATSLRGLISSLAEAASNSAL |
| GabCas7x3 | RVLDNGVLSYRKPA |
| SEQ ID NO: 565 | EINNYRLNGELAIPATSLRGMISSLAEAASNSAM |
| MetCas7x3 | RVLDNGLLSYRKTA |
| SEQ ID NO: 566 | ELDNYRLNGQLAIPATSLRGMISSLAEAASNSAM |
| MebCas7x3 | RVLDNGLLSYRKDA |
| SEQ ID NO: 567 | TQRFHQINDEIGLPGASLRGMVLSNYQILTNSCY |
| GwCas7-11 | RNLKATEEITRRMP |
| SEQ ID NO: 568 | NYRFFRINDELAIPGSELRGMVSSVYEALTNSCF |
| HreCas7-11 | RIMEEGRYLSRRMG |
| SEQ ID NO: 569 | NYAFFRINDHIAIPGASIRGMISSVFETLTHSCF |
| CmaCas7-11 | RVMDDKKYLTRRVI |
| SEQ ID NO: 570 | NYGFFRINGNVAIPGSSIRGMISSVFEALTNSCF |
| HvmCas7-11 | RVFDQERYLSRSEK |
| SEQ ID NO: 571 | NFPFFKINDEIMLPGAPLWAAVSQVYEALTNSCF |
| SmCas7-11 | RVMKQKRFLSWRME |
| SEQ ID NO: 572 | EYPSFRLNNTPMIPGAGLRAAVSQVYEVLTNSCI |
| OmCas7-11 | RIMDQGQTLSWRMS |
| SEQ ID NO: 573 | SYAFFRLHKQIMIPGSELRGMVSSVYETVTNSCF |
| DisCas7-11 | RIFDETKRLSWRMD |
| SEQ ID NO: 574 | SYRFFTLNRVPMIPGSEIRGMISSVFEALSNSCF |
| DsbaCas7-11 | RIFDEKYRLSWRMD |
| SEQ ID NO: 575 | SYAFFSVNGDIMLPGSEIRGMLSSVYEALTNSCF |
| SstCas7-11 | RVFDEGYRLSWRME |
| SEQ ID NO: 576 | MCKFFSVAGKPMIPGSEIRGMISSVYEALTNSCF |
| SybCas7-11 | RVFDEEKYLTRRVQ |
| SEQ ID NO: 577 | NYKFFNINGELMIPGSELRGMLRTHEEALTKSCF |
| CsbCas7-11 | AIFGEDSTLSWRMN |
| SEQ ID NO: 578 | NYQFFHINDEIMVPGSEIRGMISSVYEAITNSCF |
| CtcCas7-11 | RVYDETKYITRRLS |
| SEQ ID NO: 579 | TYDFFQMINAIMIPGSEIRGMISAVYEAMTNSCF |
| CbfCas7-11 | RIFHEKQYLTRRIS |
| SEQ ID NO: 580 | YYHFLKIDNKPIIPGAEIRGAVSSIYEALTNSCF |
| HvsCas7-11 | RVFGEKKVLSWRME |
| SEQ ID NO: 581 | VYKFFRLGGHLCIPAAEIRGMISSVYEALTNSCF |
| HsmCas7-11 | RVFDEKRLISWRMT |
| SEQ ID NO: 582 | SFRFFRIDDEVLIPGSEIRGMVSTVFEALTGSCF |
| FmCas7-11 | RVINQKAHLSWRIN |
| SEQ ID NO: 583 | RFKFMRMGSQAAIPGSAIRSMTSSVFEALTNSCF |
| DpbaCas7-11 | RVLDQKSHLSWRME |

[0323] Table 14 shows the representative Cas7-11 orthologs of FIG. 1K.

TABLE 14

| SEQ ID NB\ | |
|---|---|
| NAME | SEQUENCE |
| SEQ ID NO: 584 | E--------------------ALSA--IGRI-VE |
| WmCas7x3 | ----RNGELKLYPL |
| SEQ ID NO: 585 | DYV------------------ALSA--MGRI-VD |
| NisCas7x3 | ----DQGELKLQPL |
| SEQ ID NO: 586 | Q--------------------SLSA--MGRI-VR |
| GwCas7x3 | ----HDQKLYLLPL |
| SEQ ID NO: 587 | ANRN--------------EDKPLSA--LGMI-KK |
| HymCas7x3 | IETGDKVEYRLLPL |
| SEQ ID NO: 588 | SG-------------------SLSA--IGMV-VI |
| DsbCas7x3 | ----RDGKKFIYPL |
| SEQ ID NO: 589 | PSH------------------ILSA--LGMV-TK |
| GamCas7x3 | ----RGEDFWLIPL |
| SEQ ID NO: 590 | N--------------------ALRE--IGMI-VL |
| DesCas7x3 | ----RDGKRFILPL |
| SEQ ID NO: 591 | R---------------------ALRK--IGIL-F |
| GabCas7x3 | K----REEQWRLVQM |
| SEQ ID NO: 592 | D--------------------ALRK--VGMV-IY |
| MetCas7x3 | ----VDNKSFIIKL |
| SEQ ID NO: 593 | L--------------------ALSK--IGITFIN |
| MebCas7x3 | ----RQGQWQLIPM |
| SEQ ID NO: 594 | DEA------------------KYRK--AGRV-TV |
| GwCas7-11 | SGDGAQKKYSIQEM |
| SEQ ID NO: 595 | D--------------------EFKDFHPGIV--- |
| HreCas7-11 | -----VDGAKIREM |
| SEQ ID NO: 596 | ESETTQ-KRKSGRYQVEESDPDLF PGRV-QK-- |
| CmaCas7-11 | --KGNKYKIEKM |
| SEQ ID NO: 597 | DPT------------------ELTKYYPGKV-KR |
| HvmCas7-11 | ----DGNKFFILKM |
| SEQ ID NO: 598 | E--------------------DYKDFYPGRV--- |
| SmCas7-11 | ----LDGGKQIKKM |
| SEQ ID NO: 599 | SEHK-----------------DYQ---PGKI--- |
| OmCas7-11 | ----TDNGRKIQPM |
| SEQ ID NO: 600 | DHQN-----------------VLQDFLPGRV--- |
| DisCas7-11 | ----TADGKHIQKF |
| SEQ ID NO: 601 | DVK------------------ELEQFKPGRV--- |
| DsbaCas7-11 | ----ADDGKRIEEM |
| SEQ ID NO: 602 | DRN------------------VLMQFKPGRV--- |
| SstCas7-11 | ----TDNGLRIEEM |
| SEQ ID NO: 603 | KKGA-----------------KSSELVPGII-VW |
| SybCas7-11 | G---QNGGLAVQQV |
| SEQ ID NO: 604 | DEKDYKIDSNSIRKMESQRNPKYRI--PDEL-QK |
| CsbCas7-11 | ELRNSGNGLFNRLY |
| SEQ ID NO: 605 | EKKD---ESNDKNKSQDDASQKIR---KGLV-KK |
| CjeCas7-11 | ----TDEGFSIIEV |
| SEQ ID NO: 606 | EDK------------------ELREFIPGIV-RI |
| CbfCas7-11 | ----INGDVYIEKA |
| SEQ ID NO: 607 | KDAK-----------------EFM---PGRV-SK |
| HvsCas7-11 | ----KKGKLYMVKM |
| SEQ ID NO: 608 | EEAK----RPDPKKSEEQNRMRFR---PGRI-IK |
| HsmCas7-11 | ----KDKKFYAQEM |
| SEQ ID NO: 609 | DMAK-----------------HYR---PGRI-IQ |
| FmCas7-11 | ----NNEKMFIQPY |
| SEQ ID NO: 610 | DDAG-----------------DYK---PGRF-EK |
| DpbaCas7-11 | ----KDDKAVIRKF |

TABLE 15
shows sequence alignments of cas nucleases.
DOMAINS
Mutated residues; catalytic residues
Domain 1-Csm3-like (group 7 RAMP) with abnormal “G-rich” loop
Domain 2-putative small subunit (no sequence similarity but there is a conserved “W” and
four large alpha
helices predicted by Jpred in this region)
Domain 3-Csm3-like (group 7 RAMP), could be catalytic
Domain 4-Csm3-like (group 7 RAMP), *-catalytic aspartates based on Zhu X, Ye K.
Nucleic Acids Res. 2015 Jan.; 43(2): 1257-67; https://doi.org/10.1093/nar/gku1355)
Domain 5-Csm3-like with large insertion or subdomain (group 7 RAMP)
WmCas7x3, GwCas7x3, SER16298.1, PID64649.1, WP_031436019.1, HEB50754.1-III-D systems
SECTION 1

| | |
|---|---|
| SEQ ID NO: 611 | ------------------------------------------------------------------------- |
| WmCas7x3 | ------------------------------------------------------------------------- |
| | ------------------------------------------------------ |
| SEQ ID NO: 612 | ------------------------------------------------------------------------- |
| SER16298.1 | ------------------------------------------------------------------------- |
| | ----------------------------------------------------- |
| SEQ ID NO: 613 | ------------------------------------------------------------------------- |
| GwCas7x3 | ------------------------------------------------------------------------- |
| | ----------------------------------------------------- |
| SEQ ID NO: 614 | ------------------------------------------------------------------------- |
| PID64649.1 | ------------------------------------------------------------------------- |
| | ----------------------------------------------------- |
| SEQ ID NO: 615 | ------------------------------------------------------------------------- |
| WP_031436019.1 | ------------------------------------------------------------------------- |
| | --------------------------------------------------------- |
| SEQ ID NO: 616 | ------------------------------------------------------------------------- |
| HEB50754.1 | ------------------------------------------------------------------------- |
| | ----------------------------------------------------- |
| SEQ ID NO: 617 | --MSVEEFYVRLTFL-EPFRVVPWVRNGDERKGDRIYQRGGTYARWHKI-----NDSHGQPYITGTMLRSAVL |
| HreCas7x3 | REIENTLTLHNTY----GCCPGGT--RTTEGKLEKPL-YYLRRRD--GFEFENH-AEKPC-----SEEDPCPL |
| | CLIQGRFDKLRRDEKKQFVRQGNI-SFCSVNFSNLNISS---GIKSFSWE---EI |
| SEQ ID NO: 618 | ----MLKLKVKITYF-QPFRVIPWIKEDDRNSDRN-YLRGGTFARWHKDKK---DDIHGKPYITGTLLRSALF |
| CmaCas7x3 | TEIEKIKIHHSDFIH---CCNAID----RTEGKHQPS-FLRKRP----VYTENKNIQAC--------NKCPLC |
| | LIMGRGDDRGEDLKKKKHYNGKHYQNWTVHFSNFD------TQATFYWK---DI |
| SEQ ID NO: 619 | ----MTQITIQVTFFP-HPFRVVPWNHRDHRKTDRK-YLRGGTFAKWHCTAS---EGKSGRPYITGTLLRSAL |
| HvmCas7-11 | FAEIEKLIAFHDPF----KCCRGKD---KTENGNAKPL-FLRRRP-----------RADC-----DPCGTCPL |
| | CLLMGRSDTVRRDAKKQKK-------DWSVHFCNLR-EA---TERSFNWK---ET |
| SEQ ID NO: 620 | -----MRLKINIHFL-EPFRLIEWHEQDRRNKGNSRWQRGQSFARWHRRKD---NDQ-GRPYITGTLLRSVVI |
| SmCa7x3 | RAVEEELARPDTAWQ---SCGGLF---ITPDGQTKPQ-HLRHRA--TVRARQT-AKDKC---A-DRQSACPFC |
| | LLLGRFDQVGKDGDKKGEGL-----RFDVRFSNLD-LPKDFSPRDFDGPQ--EI |
| SEQ ID NO: 621 | MIPDLRSLVVHISFL-TPYRQAPWFPPEKRRNNNRDWLRMQSYARWHKVAP---EE--GHPFITGTLLRSRVI |
| oral_meta | RAVEEELCLANGIWRGVACCPGEF----NSQAKKKPK-HLRRRT--TLQWYPE-GAKSCSKQD-GRENACPFC |
| | LLLDRFGGEKSEEGRKKNN------DYDVHFSNLNPFYPGSSPKVWSGPE--EI |
| SEQ ID NO: 622 | ---MTTTMKISIEFL-EPFRMTKWQESTRRNKNNKEFVRGQAFARWHRNKK---DNTKGRPYITGTLLRSAVI |
| DisCas7-11 | RSAENLLTLSDGKISEKTCCPGKF----DTEDKDRLL-QLRQRS--TLRWT---DKNPC--PD-NAETYCPFC |
| | ELLGRSGNDGKKAEKKDW-------RFRIHFGNLS-LP---GKPDFDGPK--AI |
| SEQ ID NO: 623 | -------MKITLRFL-EPFRMLDWIRPEERISGNKAFQRGLTFARWHKSKA---DDK-GKPFITGTLLRSAVI |
| DsbaCas7-11 | RAAEHLLVLSKGKVGEKACCPGKFLTETDTETNKAPTMFLRKRP--TLKWT---DRKGC-----DPDFPCPLC |
| | ELLGPGAVGKKEGEAGI--------NSYVNFGNLS-FP---GDTGYSNAR--EI |
| SEQ ID NO: 624 | -----MIINITVKFL-GPFRMLEWTDPDNRNRKNREFMRGQAFARWHNSNP---QKG-SQPYITGTLVRSAVI |
| SstCas7-11 | RSAENLLNLSEGKVGKEKCCPGEF--RTENRKKRDAMLHLRQRS--TLQWKT--DKPLC-----NGKSLCPIC |
| | ELLGRRIGKTDEVKKKG--------DFRIHFGNLT------PLNRYDDPS--DI |
| SEQ ID NO: 625 | -----MNITVELTFF-EPYRLVEWFDWDARKKSHS-AMRGQAFAQWTWKGK---GRTAGKSFITGTLVRSAVI |
| CsbCas7-11 | KAVEELLSLNNGKWEGVPCCNGSF--QTDESKGKKPS-FLRKRH--TLQWQAN-NKNIC-----DKEEACPFC |
| | ILLGRFDNAGKVHERNK--------DYDIHFSNFD-LD---HKQEKNDLRLVDI |
| SEQ ID NO: 626 | ---MHTILPIHLTFL-EPYRLAEWHAKADRKKNKR-YLRGMSFAQWHKDKD---GI--GKPYITGTLLRSAVL |
| CjcCas7-11 | NAAEELISLNQGMWAKEPCCNGKF-----ETEKDKPA-VLRKRP--TIQWKTG-RPAICDPEKQEKKDACPLC |
| | MLLGRFDKAGKRHRDNKYDKH----DYDIHFDNLN-LI---TDKKFSHPD--DI |
| SEQ ID NO: 627 | MSKTDDKIKIKLTFL-EPYRMVNWLENGLRMTDPR-YLRGLSFARWHRNKN---GKA-GRPYITGTLLRSAVI |
| CbfCas7-11 | RAAEELLSLNLGKWGKQLCCPGQF-ETEREMRKNKT-FLRRRP--TPAWSAETKKEIC---T-THGSACAFCL |
| | LLGRRLHGGKEDVNEDAPGS---CRKPVGFGNLS-LP---FQPTKRQIQ--DV |
| SEQ ID NO: 628 | ----MKSIPITLTFL-EPYRILPWAEKGKRDKKE--YLRGANYVRLHKDKN---GK--FKPYITGTLIRSAVL |
| HvsCas7-11 | SAIEMLLDITNGEWNGKECCLAKF-----HTEGEKPS-FLRKKP----IYIRAEKDEIC---T-SRETACPLC |
| | LILGRFDKAEKKEKDKE--------KFDVHFSNLN-LY---SSKEFSTIE--EL |
| SEQ ID NO: 629 | ----MTKIPISLTFL-EPFRLVDWVSESERDKSE--FLRGLSFARWHRIKNQREDENQGRPYITGTLLRSAVI |
| HsmCas7-11 | KAAEELIFLNGGKWQSEECCNGQF--KGSKAKYRKVE-CPRRRHRATLKW----TDNTC---S-DYHNACPFC |
| | LLLGCLKPNSKE-------------NSDIHFSNLS-LP---NKQIFKNPP--EI |
| SEQ ID NO: 630 | ----MPRFQLSLTFFDEPFRLIEWTDKSNRNSANTQWMRGQGFARWHKITL---EK--GFPFVTGTAVRSKII |
| FmCas7-11 | REVEALLSRNKGTWNGIPCCSGFF-----DTKGPSPT-HLRYRP--TLEWEY--GKTVC---T-SEADVCPLC |
| | LLLGRFDQAGKKSDTPCQST-----DYHVNHWENLS--A---GVAQYR-LE--DI |
| SEQ ID NO: 631 | --------------F-E------------------------SYARWCKSNS---GL--WKPYIPGTLLRSAVL |
| DpbaCas7-11 | ESVEYLLAL-IGSKNKVEICPGLY---TQSENNPDTK-YLRRRP--WYELHA--QKEIC---K-TRDTACPLC |
| | LLMRTKLDNDGDGETEK----------NVKFGNL-------YPTSPLEPL--QK |
| Domains | |

.........................................................................................
........................
SECTION 2

| | |
|---|---|
| | D177 atypical G-rich loop |
| WmCas7x3 | ------------------------------------------------------------------------- |
| | ------------------------------------------------------------------------- |
| | ------------------------------------------------------ |
| SER16298.1 | ------------------------------------------------------------------------- |
| | ------------------------------------------------------------------------- |
| | ----------------------------------------------------- |
| PID64649.1 | ------------------------------------------------------------------------- |
| | ------------------------------------------------------------------------- |
| | ----------------------------------------------------- |
| WP_031436019.1 | ------------------------------------------------------------------------- |
| | ------------------------------------------------------------------------- |
| | -------------------------------------------------------- |
| HEB50754.1 | ------------------------------------------------------------------------- |
| | ------------------------------------------------------------------------- |
| | ------------------------------------------------------- |
| HreCas7-11 | AVSRVVNRVDPNSGKAKDFFRVWEIDHKLCPNFLGKMSISLS----EKLEDVKALLAVGLAQVNVLSGALCRV |
| | DIID-------------------------PETQKDTVHQHLIQQFVTRIQDKEKGDAADIPAFTLPPAGLSPS |
| | SNEWNDTIKSLAEKIR--KIKELEQGQKLRQMADVIREL-RRKTPAYLDQ---- |
| CmaCas7-11 | VQKRILNRVDQTCGKAKDFFKVCEVDHIACPTLNGIIRINDEKLSQEEISKIKQLIAVGLAQIESLAGGICRI |
| | DITN--------------------------------------QNHDDLIKSFFETKPSKILQPNL---KESGE |
| | ERFELAKLELLAEYLT-QSFDANQKEQQLRRLADAIRDL-RKYSPDYLKD---- |
| HvmCas7-11 | AIERIVNRVDPSSGKAKDYMRIWEIDPLVCSQFNGIITINLD---TDNAGKVKLLMAAGLAQINILAGSICRA |
| | DIIS------------------EDHDALIKQFMAIDVREPEVSTSFPLQDDELNNAPAGCGDDIESTDQPVGH |
| | NLVDRVRISKIAESIE=DVFSQEQKAQQLRRMADAIRDL-RRSKPDETTLDA-- |
| SmCas7x3 | GSRRTINRVDDETGKAHDFFSIWEVDA--VREFQGEIVLAAD-L--PSRDQVESLLHHALGFVDRLCGARCVI |
| | SIAD--------------------------------------------------QKPAEREERTV----AAGD |
| | EKATIADYDQVKGLPY----------TRLRPLADAVRNL-RQLDLAELNKPDGK |
| oral-meta | GRLRTLNRIDRLTTKAQDFFRIYEVDQ--VRDFFGTITLAGD-L--PRKVDEFLLRRGLGFVSTLCGAQCEIK |
| | VVD--------------------------------------------------LKKKQNNKEDSI----LPVS |
| | EVPFFLEPEVLAKMCQ-DVFPS----GKLRMLADVILRL-REEGPDNLT----- |
| DisCas7-11 | GSQRVLNRVDFKSGKAHDFFKAYEVDHTRFPRFEGEITIDNK-V--S--AEARKLLCDSLKFTDRLCGALCVI |
| | RVDE--------------------------------------------------YTPAADSGKQT----ENVQ |
| | AEPNANLAEKTAEQII-SILDDNKKTEYTRLLADAIRSL-RRSSKLVAG----- |
| DsbaCas7-11 | AVRRVVNRVDYASGKAHDFFRIFEVDHIAFPCFHGEIAFGEN-V--S--SQARNLLQDSLRFTDRLCGALCVI |
| | RYDG--------------------------------------------------DIPKCGKTAPLPETESI-- |
| | --QNAAEETARAIVRVFHGGRKDPEQAQIDKAEQIQLLSAAVREL-GRDKKKVSA----- |
| SstCas7-11 | GTQRTLNRVDYATGKAHDFFKVWEIDHSLLSVFQGKISIADN-I----GDGATKLLEDSLRFTDRLCGAICVI |
| | SYDC--------------------------------------------IENSDGKENGKTGEAAH----IMGE |
| | SDAGKTDAENIANAIA-DMMGTAGEPEKLRILADAVRAL-RIGKNTVSQ----- |
| CsbCas7-11 | ASGRILNRVDFDTGKAKDYFRTWEADYETYGTYTGRITLRN--------EHAKKLLLASLGFVDKLCGALCRI |
| | EVIK----------------------------------------KSESPLPSDTKEQSYTKDDTV-----EVL |
| | SEDHNDELRKQAEVIV-EAFKQNDKLEKIRILADAIRTL-RLHGEGVIEKDE-- |
| CjsCas7-11 | ASERILNRVDYTTGKAHDYFKVWEVDDDQWWQFTGTITMHDD------CSKAKGLLLASLCFVDKLCGALCRI |
| | EVTG----------NNSQDENKEYAHPDTGIITSLNLKYQNNSTIHQDAVPLSGSAHDNDEPPVH--DNDSSL |
| | DNDTITLLSMKAKEIV-GAFRESGKIEKARTLADVIRAM-RLQKPDIWEK---- |
| CbfCas7-11 | CKERVLNRVDFRTGKAQDYFRVFEIDHEDWGVYTGEITITE--------PRVQEMLEASLKFVDTLCGALCRI |
| | EIVG-------------------------------SADETKRTTSSKEGCPASTTTRDCSSSEND----DTSP |
| | EDPVREDLKKIAHVIA-NAFQNSGNREKVHALADAIRAM-RLEESSIINT---- |
| HvsCas7-11 | APKRALNRIEQYTGKAQDYFTVYEALNKEFWTFKGRIRIKED-I----YDKVTDLLFSALRCVEKIAGALCRI |
| | EIDK---------------------------------------------------EPSQQKGFVK-------- |
| | ----RQLSKQAKEDIE-KIFQVVKDAQKLRLLSDCFRELTRMANKDELA----- |
| HsmCas7-11 | GIRRILNRVDFTTGKAQDYFYVWEVEHSMCPKFQGTVKINED-M--PKYNVVKDLLISSIQFVDKLCGALCVI |
| | EI-------------------------------------------------------GKTKNYIC----QSFS |
| | SNIPEEEIKKLAQEIR-DILKGEDALDKMRVLADTVLQM-RTKGPEIVNE---- |
| FmCas7-11 | AQKRTSNRVDFFSKKAHDHYGVWEVTA--VKNLLGYIYASDA-ITESHQKTVISLLKAALSFTDTLCGANCKL |
| | ELSD------------------------------EPVDSIHSNQSASNFNPHSGAAPSQCSQSMP----PFNM |
| | DQETKELANTLCKAFT-------GNMRHLRTLADAVREM-RRMSPGISS----- |
| DpbaCas7-11 | IRPRILNRMDPGTSKARDYFRVFEIENQLCSQFRGWIWLSGD-L--PNMELVKSLLAAGLSNVATLAGAVCRI |
| | RIVSTDNPSMKQDLTTQDLIDDFTNYYLKGDTPPANLAASDILSQISASEQLRRLADIMRDL-RQDSNREIMY |
| | RQ-- |

Domains
.........................................................................................
........................
SECTION 3

| | |
|---|---|
| D429 | |
| WmCas7x3 | ------------------------------------------------------------------------- |
| | ------------------------------------------MTTPSAPKSSL------PA----LHWLIRAE |
| | LEVLTPLHLG----------------------TGTDQRITPDAPDA-----DPY |
| SER16298.1 | ------------------------------------------------------------------------- |
| | -----------------------------------------------MTDTV------KS----GRWIITGQF |
| | QLVTPMHIG----------------------TGLDEEMDKQSGESVDKKQNNS |
| GwCas7x3 | ------------------------------------------------------------------------- |
| | --------------------------------------------------------MSNQ----TRWIIEGTL |
| | ELITPLHIG----------------------TGLDE-------KERDENKETR |
| PID64649.1 | ------------------------------------------------------------------------- |
| | ------------------------------------MSDTQKQAIHENKWHF-----RGI----KRWEISAYL |
| | KTLSPLHIG----------------------DG---GTIPVTIKDTQGKNREV |
| WP_031436019.1 | ------------------------------------------------------------------------- |
| | ------------------------------------------------NMLPTWKL-----NNE----KRWHI |
| | SIVLTTATPLHIG----------------------SG--EFCEHDDVKNNDG--EPV |
| HEB50754.1 | ------------------------------------------------------------------------- |
| | -------------------------------------------MAAVQDRWTLMDQQGNEL----KRFRITAE |
| | LETASSLHIG----------------------AS--ETVEHDLIKNDDG--TPV |
| HreCas7-11 | -LPAGKPEG--------RESIWEK------------TPTGE-TLTLRQLLKSANVPGE-------SWRAFCEE |
| | LGEQLYRLEKNLYS--HARPLPRLLGETEFYGQPARKS---DDPPMIRASYR----AFPS----YVWVLDGIL |
| | RAETPFYFG-----------------------TET-----------SEGQTS- |
| CmaCas7-11 | -LPKGKKGG--------RTSIWNK------------KVADD---FTLRDCLKNQKIPNE-------LWRQFCE |
| | GLGREVYKISKNISN--RSDAKPRLLGETEYAGLPLRKE---DEKEYSPTYQN----QESLPK--TKWIISGE |
| | LQAITPFYIG-----------------------HVN-----------KTSHTR- |
| HvmCas7-11 | -LPKGKTDK--------DNSVWDKPLKKDILPSPRMPASEDDDTPTLRKVLKDEINGQED------MWRKFCE |
| | ALGNSLYDLSKKAKERKRTEALPRLLGETEIYGLPMREN---KEDEPLPSSLT----YK------FKWLIAGE |
| | LRAETPFFFG-----------------------TEV-----------QEGQTS- |
| SmCas7-11 | FLPPGRVNK---DGRRVPHYVWDIP-----------LGKGD----TLRKRLEFLAASCEGDQA---KWRNICE |
| | SEGQALYEKSKKLKD--SPAAPGRHLGAAEQVRPPQPPV---SYSEESINSDL----PL------AEWIITGT |
| | LRAETPFAIGM---------------------DPAI-----------DDDQTS- |
| oral_meta | -LPMGSQGL---GGRL-PHHLWDVP-----------LVSKDRETQTLRSCLEKIAAQCKSEQT---QFRLFCQ |
| | KLGSSLFRINKGVYL--APNSKISP----EPCLDPSKTI---RTKGPVPGKQK----HRFSLLPPFEWEEIGT |
| | LKAQTPFFIP----------------------DEQG-----------SHDHTS- |
| DisCas7-11 | -LPKDHDGK---D----DHYLWDIG-----------KKKKDENSVTIRQILTTSADTKELKNAG--KWREFCE |
| | KLGEALYLKSKDMSG--GLKITRRILGDAEFHGKPDRLE---KSRSVSIGSVL------------KETVVCGE |
| | LVAKTPFFFG----------------------AIDE-----------DAKQTD- |
| DsbaCas7-11 | -LPLNHEGK---E----DHYLWDK------------KAGGE----TIRTILKAAAEKEAVAN----QWRQFCI |
| | ELSEELYKEAKKAHG--GLEPARRIMGDAEFSDKSVPDT---VSHSIGISVE-------------KETIIMGT |
| | LKAETPFFFG----------------------IESK-----------EKKQTD- |
| SstCas7-11 | -LPLDHEGK---E----NHHLWD-------------IGEGK----SIRELLLEKAESLPSD-----QWRKFCE |
| | DVGEILYLKSKDPTG--GLTVSQRILGDEAFWSKADRQL---NPSAVSIPVT-------------TETLICGK |
| | LISETPFFFG----------------------TEIE-----------DAKHTN- |
| CsbCas7-11 | -LPDGKEER---DK---GHHLWDI------------KVQGT----ALRTKLKEKWQSNKDI-----GWRKFTE |
| | MLGSNLYLIYKKET--GVSTRFRILGDTEYYSKAHDSE---GSDLFIPVTPP----EGIET---KEWIIVGRL |
| | KAATPFYFGVQQPSDSIPGKEK------KSEDSLV-----------INEHTS- |
| CjcCas7-11 | -LPKGINDK---------HHLWDR------------EVNGK----KLRNILEELWRLMNKRN----AWRTFCE |
| | VLGNELYRCYKEKTG--GIVLRFRTLGETEYYPEPEKTPECLISDNSIPITPL----GGV-----KEWIIIGR |
| | LKAETPFYFGVQSSFDSTQDDLDLVPDIVNTDEKLE-----------ANEQTS- |
| CbfCas7-11 | -LPKGKSEKTTEQIEVNKHYLWDEI-----------PVNDT----SVRHILIEQWRRWQSKKDD-PEWWKFCD |
| | FLGECLYKEYKKLTS--GIQSRARVMGETEYYGALGMPD---KVIPLLKSDKT------------KEWILVGS |
| | LKAETPFFFGLET-------------------EQTE-----------EVEHTS- |
| HvsCas7-11 | -LPLGPEDD--------GHYLWDKI-----------KVEGK----TLRIFLRNCFSQYKD------NWLCFCD |
| | EASKKGYQKYREKRH--KLTDRELPTATPKHFAEKKDPQ---ISPIYIDKDDK----V-------YEWIIVGR |
| | LIAQTPFHFG-------------------------------------DEEKAE- |
| HsmCas7-11 | -LPRGIEKK---G----GHWLWDKL-----------R---------LRKKFKEIANNYKD------SWQELCE |
| | KLGNELYISYKELTG--GIAVKKRIIGETEYRKIPEQEI---SFLPSKAGYS-------------YEWIILGK |
| | LISENPFFFG----------------------KETK-----------TEEQID- |
| FmCas7-11 | -LPRGRLNK---EGEITAHYLWDE------------RIDEK----TIRQVLEDIELSPARSIIYKNWISFCNQ |
| | LGQKLYERAKD-ND--PILERKRPLGEAAFSKVPTSSH---APRHDMNSRVK----GGFT----REWIIVGTL |
| | RALTPFYMG----------------------TGSQ-----------AGKQTS- |
| DpbaCas7-11 | -VAEENHEK--------ASLLYKK------------TKKGD----SIAALIAGKTEGMDA-----ETWRRLCE |
| | FLGQTFYGEAKEAGL--VETPVPRILGESERYSLQKKPT---VRTDLAAELVP----D-------IEFIIKGN |
| | LIAETPFFFG----------------------TDIA-----------TETHTD- |

Domains
.........................................................................................
........................
SECTION 4
G-rich loop

| | |
|---|---|
| WmCas7x3 | WQADIALDADGRPYLPGASLKGALKALARRRQVDAPCL-PLFGDLNRGGAPHPDCIPPRRTRAGLAEFRDALQ |
| | SHAT--QAD--GPDT---------AQPRIAIDRITGSVVDKKLFHTQTVPVGTRFSVEI--ILRRADQ--NLA |
| | AQLVALLQHGPT-----DPDFRLGAHANLGFGRVGL-YGNIDTRRFGPQQAQ-H |
| SER16298.1 | WIQAIALDLNKKPYIPGASIKGALKALARRYYCASNL--NIFGDTI--DTKDGDNKRKSVTVAGQAEFLNA-W |
| | YAAD--QED--KPFD---------TITRVAIDRVTGTAEDRKLFNTRRVNPGVCFNYKI--IIQNACE--TEI |
| | QYLLDLLRKAAK-----DPSFSLGAGANQSQGKVRC-LSSC-VRYFGKQEMH-D |
| GwCas7x3 | WLEAVALDHKGQPYIPGASLKGALRALAKRHD---------FRNLF--DNKEVDGD-----FVRQAEFLSA-W |
| | CVPD--TDK--GRL----------IQPRVAIDRVTGTAQDKKLFQTRLITPGTRFAMKI--VVQNAVE--NEI |
| | ADLLGLLNLLPD-----DPQFSLGAYANQGQGRVQW-FGKIQTRCFGINEAK-A |
| PID64649.1 | EVNSVITGKAALPIIPGSTIKGRLRHYFSKHFSDKALLNKVFGEES--DATDDDQG-----RGGLAEFHDAKW |
| | NPEK--NRNLQGRYPYWNNTRKTYIEVSTAINRHTGAAKDKSLHHTECVPPGTVFEIKITGSMDDRCA--ALV |
| | VAALEAIQTTGS-----RIFL--GAEDANGNGRIGL-TGKITVKQMDQAHII-Q |
| WP_031436019.1 | KINACIKGSKGRPIIPGSTIKGKLYEWLKTRNTEENLLEKLFGKGH--NSVSQDQG-----RGGKAEFHDAEI |
| | IEPL--TGS--QPWPYWREEQAFIAASTAIDRHKQVALQQSLHYMETVPAGIRFKFTFTGVMRDEEA--ALLI |
| | AALDSFDKNQN-----QPCF--GVDRANAYGRMEL-HGHLHVKVMGATEIS-S |
| HEB50754.1 | QINALITGAGGLPIIPGSTIKGRFLARLRERGVDSALLETLFGKGH--DRETEDQG-----RGGRAEFHDAPL |
| | CHRL--SGA--RHFPYWRPERQIWVKAQTAVDRHRGTALRRSLRYTEMVPPGVRFRLTITGCMTDAEA--DVL |
| | FALLEDLGDPRQ-----ACSF--GGAGADGNGTMRL-FGRPEVYCLDRSGIL-G |
| HreCas7-11 | --QAIILCPDGSYRLPRSLLRGVIRRDLRAIL-GTGCNVSLGKVRP--CSCPVCE------IMRRITVQQG-- |
| | -VSS--YRE--PAE----------VRQRIRSNPHTGTVEEGALFDLETGPQGMTFPFRL----YFRTRSPYID |
| | RALWLTINHWQE-----GKAI-FGGDIGVGMGRFRL-E-NLQIRSADLVSRR-D |
| CmaCas7-11 | --STIFLNMNGQFCIPRSTLRGALRRDLRLVF-GDSCNTPVGS-RV--CYCQVCQ------IMRCIKFEDA-- |
| | -LSD--VDS--PPE----------VRHRIRLNCHTGVVEEGALFDMETGFQGMIFPFRL----YYESKNEIMS |
| | QHLYEVLNNWTN-----GQAF-FGGEAGTGFGRFKL-L-NNEVFLWEIDGEEED |
| HvmCas7-11 | --ATILLNRDGYFRLPRSVIRGALRRDLRLVMGNDGCNMPIGG-QM--CECGVCR------VMRHIVIEDG-- |
| | -LSD--CKI--PPE----------VRHRIRLNCHTGTVEEGALFDMETGYQGMTFPFRL----YCETENSDLD |
| | SYLWEVLNNWQN-----GQSL-FGGDTGTGFGRFEL-T-EPKVFLWNFSKKE-K |
| SmCas7-11 | --SRTLVDRDGRYRLPRSTRGILRRDLSLASGDQGCQVRLGPERP--CTCPVCL------ILRQVVIADT--- |
| | VSE--TTV--PAD----------IRQRIRRNPITGTAADGGLFDTERGPKGAGFPFSL----RYRGH-APMPK |
| | ALRTVLQWWSA-----GKCF-AGSDGGVGCGRFAL-D-NLEVYRWDLGTFA-F |
| oral_meta | --RKILLTRDFYYRLPRSLLRGIIRRDLHEATDKGGCRVELAPDVP--CTCQVCR------LLGRMLLADT-- |
| | -TST--TKV--APD----------MRHRVGVDRSCGIVRDGALFDTEYGIEGVCFPLEI----RYRGN-KDLE |
| | GPIRQLLSWWQQ-----GLLF-LGGDFGIGKGRFRL-E-NMKIHRWDLRDES-A |
| DisCas7-11 | --LQVLLTPDNKYRLPRSAVRGILRRDLQTYF-DSPCNAELGG-RP--CMCKTCR------IMRGITVMDA-- |
| | -RSE--YNA--PPE----------IRHRTRINPFTGTVAEGALFNMEVAPEGIVFPEQL----RYRGSEDGLP |
| | DALKTVLKWWAE-----GQAF-MSGAASTGKGRFRM-E-NAKYETLDLSDEN-Q |
| DsbaCas7-11 | --LMLLLDGQNHYRIPRSALRGILRRDIRSVL-GTGCNAEVGG-RP--CLCPVCR------IMKNITVMDT-- |
| | -RSS--TDT--LEP----------VRPRIRLNPFTGSVQEKALFNMEMGTEGIEFPFVL----SYRGK-KTLP |
| | KELRNVLNWWTE-----GKAF-LGGAASTGKSIFQL-S-DIHAFSSDLSDET-A |
| SstCas7-11 | --LKVLLDRQNRYRLPRSAIRGVLRRDLRTAFGGKGCNVELGG-RP--CLCDVCR------IMRGITIMDA-- |
| | -RSE--YAE--PPE----------IRHRIRLNPYTGTVAEGALFDMELGPQGLSFDFIL----RYRGKGKSIP |
| | KALRNVLKWWTK-----GQAF-LSGAASTGKGIFRL-D-DLKYISFDLSDKD-K |
| CasCas7-11 | --FNILLDKENRYRIPRSALRGALRRDLRTAF-GSGCNVSLGGQIL--CNCKVCI------EMRRITLKDS-- |
| | -VSD--FSE--PPE----------IRYRIAKNPGTATVEDGSLFDIEVGPEGLTFPFVL----RYRGH--KFP |
| | EQLSSVIRYWEENDGKNGMAW-LGGLDSTGKGRFAL-K-DIKIFEWDLNQ---K |
| CjcCas7-11 | --FRILMDKKGRYRIPRSLIRGVLRRDLRTAFGGSGCIVELGRIMP--CDCKVCA------IMRKITVMDS-- |
| | -RSE--NIE--LPD----------IRYRIRLNPYTATVDEGALFDMEIGPEGITFPFVF----RYRGE-DALP |
| | RELWSVIRYWMD-----GMAW-LGGSGSTGKGRFAL-I-DIKVFEWDLCNEE-G |
| CbfCas7-11 | --LRLVMDKKGRFRIPRSVLRGALRRDMRIAF-DSGCDVKLGSPLP--CDCSVCQ------VMRSITIKDS-- |
| | -RSE--AGK--LPQ----------IRHRIRLNPFSGTVDEGALFDIEVAPEGVIFPFVM----RYRGE--EFP |
| | PALLSVIRYWQD-----GKAW-LGGEGATGKGRFALAK-DLKMYEWKLEDK--S |
| HvsCas7-11 | --GAILLTPDNRFRLPRTALRGILRRDLKLAG-ASACEVEVGRSEP--CPCDVCK------IMRRVTLLDT-- |
| | -VSEDLRDF--LPE----------LRKRIRINPQSGTVAEGALFDTEVGPEGLSFPFVL----RYKCE--KLP |
| | DSLTTVLCWWQE-----GLAF-LSGESATGKGRFRL-E-INGAFVWDLQK---G |
| HsmCas7-11 | --MQILLTKDGRYRLPRSVLRGALRRDLRLVI-GSGCDVELGSKRP--CPCPVCR------IMRRVTLKDA-- |
| | -RSD--YCK--PPE----------VRKRIRINPLTGTVQKGALFTMEVAPEGISFPFQL----RFRGE-DKFH |
| | DALQNVLVWWKE-----GKLF-LGGGASTGKGRFKL-E-IEHVLKWDLKN---N |
| FmCas7-11 | --MPTLQDSNDHFRLPRTALRGALRRDINQASDGMGCVVELGPHNL--CSCPVCQ------VLRQIRLLDT-- |
| | -KSK--FSM--PPA----------IRQKICKNPVLSIVNEGSLFDVELGIEFETFPFVM----RYRGG-AKIP |
| | DTIITVLSWWKN-----ERLF-IGGESGTGRGRFVL-E-CPRIFCWDVEK---G |
| DpbaCas7-11 | --LPILLTSDRHFRIPRSVLRGILRRDLRLVT-GSGCSVKLGRSEP--CACDVCQ------IMRSLTMRDC-- |
| | -VSS--CKV--PPE----------IRHRIRLNPVTETVEEGALFDMEIGPQGISFPFVL----RSRGVNSSFS |
| | TRLKNVLTWWSE-----GKIF-MGGDKGTGKGRFTL-A-ELEAYYFRLTTKRIG |

Domains
.........................................................................................
........................
SECTION 5

| | |
|---|---|
| | D654 |
| WmCas7x3 | WF-----AAAQTQADARW-TDFAEA---VT-----------------LTAPAPAPAQP--------------- |
| | -APHRLALP--------------------------------LSLTFHTPFLVKQPEKHK--R----KPQDNAP |
| | DGTPR----QRGD----------RA----LLPGASLRGRLRSQAERILRTLGCK |
| SER16298.1 | WF-----RAIQNGKQEHW-WIFAKP---SN-----------------IKYADLERPDI--------------- |
| | -IANSLNLP--------------------------------LTLDFHTPFLVKASKKK--------DEAKNEA |
| | DAKPR---TNHQG----------QV----ILPASSLRGRLRAQAEKILRTMGQD |
| GwCas7x3 | WY-----EEIRKDESKCW-TAFAKP---KN-----------------VSTP---PTPA--------------- |
| | ---KI----VLPASSLRGRLRTQSERILRTLGCE |
| PID64649.1 | WL-----Q-----KDST--TCVASF---SN-----------------VKAENETQVKQ--------------- |
| | -MVQRHIAPKLNSVVSAAG------------------PSYDITLHFDGPFVVVNDSDKC---------KAEDT |
| | PDIYPL---EEKNG----------VP----AFPVRSFRGAIRSQAERIIRTIGGQ |
| WP_031436019.1 | WL-----NSFSE-NDKK--MAMESA---RN-----------------LEQQENITLIE--------------- |
| | -QGNALFKA------SCDE------------------VKLGLTLKFKGPFLVNDPYAVKILS----SNENAKT |
| | DHYPL---LDKNR----------NP----YLPVSSFRGVLRSQAERIIRTLGGK |
| HEB50754.1 | WL-----ASFEKGGNGG--MAMTAA---AL-----------------LQADTVQRRAD--------------- |
| | -KVRQAQWP------PDVG------------------PRLHVELRFSGPFLVNDPSRN---T----PDITQAP |
| | DMVPL---VDEDG----------NP----MLPASSFRGALRAQAERIIRTLGGR |
| HreCas7-11 | FS-----LYLRA---RGL-KGLSR----EE-----------------VTRIGLNEEQWEAVMA----DD---- |
| | -PGTHYNPF------P--W------------------EKISYTLLIHSPLISNDPIAAM--L----D--HDNK |
| | DAVMVQKTVLFVDESGN-----YSQMPHHFLKGSGIRGACRFLLGRK------- |
| CmaCas7-11 | YL-----QYLFS---RGY-KGIE-----TD-----------------EIKKVADPIKWKTLF-----TK---- |
| | -LEIPPEKI------P--L------------------TQLNYTLTIDSPLISRDPIAAM--L----D--NRNP |
| | DAVMVKKTILVYEQDSSTHKNVPKEVPKYFIKSETIRGLLRSIISRT------- |
| HvmCas7-11 | HE-----AYLLN---RGF-KGQMPV---QD-----------------VKTKSFKTKTWFQIH-----RE---- |
| | -LDISPKKL------P--W------------------YSTDYRFNVTSPLISRDPIGAM--L----D--PRNT |
| | DAIMVRKTVFCPDPNA---KNRPAPATVYMIKGESIRGILRSIVVR-------- |
| SmCas7x3 | RQ-----AYSEN---NGL-RSPEEEFDLAV-----------------IHELAEGLAKEDGQK----------- |
| | -ILKGTEPF------TC-W------------------QERSWQFSFTGPLLQGDPLAAL--N-------SDTA |
| | DIISFRRTVVDNGEVL------REP----VLRGEGLRGLLRTAVGRV------- |
| oral_meta | RA-----DYVQK---CGLRRGVGDDTAINL-----------------EKDLSLNLPE---------------- |
| | ------SGY------P--W------------------KKHAWKLSFQVPLLTADPIMAQ--T-------RHEE |
| | DSVYFQKRIFTSDGRVV-----LVP----ALRGEGLRGLLRTAVSRA------- |
| DisCas7-11 | RN-----DYLKN---WGW-RDEKGL---EE-----------------LKKRLNSGLP---------------- |
| | -EPGNYRDP------K--W------------------HEINVSIEMASPFINGDPIRAA--V----D--KRGT |
| | DVVTFVKTKAEGEEAK------PVC----AYKAESFRGVIRSAVARI------- |
| DsbaCas7-11 | RE-----SYLSN---HGW-RGIMEN---SI-----------------VHESPLEGGAGGCSF----------- |
| | -GLSDLPKL------G--WHAEDLKLSDIEKYKPFHRQKISVKITLNSPFLNGDPVRAL--T-------EDVA |
| | DIVSFKKYTQGGEK--------IIY----AYKSESFRGVVRTALGLR------- |
| SstCas7-11 | RK-----DYLDN---YGW-RNRIEA---LS-----------------LEKMPLD------------------- |
| | -RMNDYAEP------L--W------------------QKVSVEIEIGSPFLNGDPIRAL--I----E--KDGS |
| | DIVSFRKYADDSGK--------EVY----AYKAESFRGVVRAALARQ------- |
| CsbCas7-11 | IN-----EYIKE---RGM-RGKEKELLEMG-----------------ESSLPDGLIPYKFFEEREC-LF---- |
| | -PYKENLKP------Q--W------------------SEVQYTIEVGSPLLTADTISAL--T----E--PGNR |
| | DAIAYKKRVYNDGNNA------IEPEPRFAVKSETHRGIFRTAVGRR------- |
| CjcCas7-11 | LK-----AYICS---RGL-RGIEKEVLLENKTIAEITNLFKTEEVKFFESYSKHIKQLCHECIINQISFLWGL |
| | RSYYEYLGP------L--W------------------TEVKYEIKIASPLLSSDTISAL--L----N--NDNI |
| | DCIAYEKRKWENGGIK------FVP----TIKGETIRGIVRMAVGKR------- |
| CbfCaS7-11 | LH-----AYIDT---YGH-RGNEHAIGTGQ-----------------GIDGFRSGSLSDLLSDISKESFRDPL |
| | ASYHNYLDK------R--------------------IKVGYQITIGAPLLSADPIGAL--L----D--PNNVD |
| | AIVFEKMKLDGDQVK------YLP----AIKGETIRGIVRTALGKR------- |
| HvsCas7-11 | LF-----NYIKN---HGF-RGEERLFLEGN-----------------EAELEKMGIQINTELLQPEMIK---- |
| | -KEKNFTDF------P--Y------------------DLIKYQLNISSPLLLNDPIRAI--ALYEGE--GKAP |
| | DSVFFKKYVFENGKIE------EKP----CFKAESIRGIFRTAVGRI------- |
| HsmCas7-11 | FH-----SYLQY---KFL-RDKGDFNSIKE-----------------IEGLKVETEEFKVK------------ |
| | ------KPF------P--W------------------SCVEYTIFIESPFVSGDPVEAV--L----D--SSNT |
| | DLVTFKKYKLEESK--------EVF----AIKGESIRGVFRTAVGKN------- |
| FmCas7-11 | QN-----DYIQY---HGF-RNKEDEL--LS-----------------VYSTVSGLAEKNDV------------ |
| | -NLNNARDF------S--F------------------DKICWEVQFDGPVLTGDPLAAL--F------- |
| DpbaCas7-11 | KNVWVIGNYLKS---QGW-RG-------AE-----------------LETHFDSLKEWKSL------SF---- |
| | -SDSDVKVF------T--W------------------HKITWKVSFEGPVLTNDPIAAD--I-------RNES |
| | DAVFYQKSV--AGEKG------PVY----ALKGEGLRGIVSSSLCKK------- |

Domains
.........................................................................................
........................
SECTION 6

| | |
|---|---|
| WmCas7x3 | VAQG--------HAVPPVKNNTCP-DPATL-----LFGTAGWRGLLRTDD----------------------- |
| | -----CTGTA--------------------------------------------------------------- |
| | --------------PAT----------------------------------LVD |
| SER16298.1 | IPQG--------HAAPAYDGIAHR-DLISL-----LFGTAGWKGIVCASDLHISIPEYALQFNGVRETISDLS |
| | DTVKSCIIVDLVKTSTAAEKTEEQLHIRIVDSAGSLIVHKSENSSWANDTFRDASVKDNFKARLKEIADPQDL |
| | SDALRADIKKRAFQLAT----------------------------------LTR |
| GwCas7x3 | TPQG--------HTAPAYRKGQPHDDLAVL-----LFGAAGWRGIVQTSD----------------------- |
| | -----CIVED--------------------------------------------------------------- |
| | -------------KSIK----------------------------------TRR |
| PID64649.1 | CCDG--------SINNTCK------NPKNLCIACEMFGSTGWKTSIEMDPFL--------------------- |
| | -----CVDRE--------------------------------------------------------------- |
| | --------------LKP----------------------------------FII |
| WP_031436019.1 | CCS----------TDDPCKPIFDKGDLSKLCLACQIFGASGWKTVINIHDFK--------------------- |
| | -----AINKS--------------------------------------------------------------- |
| | ----------------K----------------------------------KTK |
| HEB50754.1 | CCD----------TSSPCRPLGSSDKVGELCLACQVFGAPGWGTTLHIQGFT--------------------- |
| | -----CTSV---------------------------------------------------------------- |
| | --------------FRR----------------------------------EQE |
| HreCas7-11 | -DAPNE------NGLTYFE--ADHEE--CDCLLCSLFGSKHYQGKLRFEDAE--------------------- |
| | -----LQDEV--------------------------------------------------------------- |
| | ---------------EA-----------------------------------IK |
| CmaCas7-11 | -EIKLE----DGKKERIFN--LDHED--CDCLQCRLFGNVHQQGILRFEDAE--------------------- |
| | -----ITNKN--------------------------------------------------------------- |
| | ---------------VS----------------------------------DCC |
| HvmCas7-11 | -------------NEELYD--TDHED--CDCILCRLFGSIHQQGSLRFEDAE--------------------- |
| | -----VQNSV--------------------------------------------------------------- |
| | ---------------SD-----------------------------------KK |
| SmCas7x3 | ------------AGDDLLT--RSHQD--CKCEICQLFGSEHRAGILRFEDLP--------------------- |
| | -----PVSPT--------------------------------------------------------------- |
| | ---------------TV---------------------------------ADKR |
| oral_meta | ------------YGISLIN--DEHED--CDCPLCKIFGNEHHAGMLRFDDMV--------------------- |
| | -----PVGTW--------------------------------------------------------------- |
| | ---------------ND-----------------------------------KK |
| DisCas7-11 | -HME--------DGVPLTE--LTHSD--CECLLCQIFGSEYEAGKIRFEDLV--------------------- |
| | -----FESDP--------------------------------------------------------------- |
| | ---------------DP-----------------------------------VT |
| DsbaCas7-11 | -NQGNDDIT-GKKNVPLIA--LTHQD--CECMLCRFFGSEYEAGRLYFEDLT--------------------- |
| | -----FESEP--------------------------------------------------------------- |
| | ---------------EP-------------------------------------RR |
| SstCas7-11 | -HFDKEGKPLDKEGKPLLT--LIHQD--CECLICRLFGSEHETGRLRFEDLL--------------------- |
| | -----FDPQP--------------------------------------------------------------- |
| | ---------------EP-----------------------------------MI |
| CsbCas7-11 | ------------TGDLG-K--EDHED--CTCDMCIIFGNEHESSKIRFEDLE--------------------- |
| | -----LINGN--------------------------------------------------------------- |
| | ---------------EF-----------------------------------EKLEKH |
| CjcCas7-11 | ------------SGDLG-M--DDHED--CSCTLCTIFGNEHEAGKLRFEDLE--------------------- |
| | -----VVEEK--------------------------------------------------------------- |
| | ---------------LPSEQNSDSNKIPFGPVQDGDGNREKECVTAVKSYKKKL |
| CbfCas7-11 | ------------NNLLA-K--NDHDD--CTCSLCAIFGNENETGKIRFEDLE--------------------- |
| | -----VYDKD--------------------------------------------------------------- |
| | ---------------IA-----------------------------------KK |
| HvsCas7-11 | ------------KNVLT----KNHED--CICVLCHLFGNVHETGRLKFEDLK--------------------- |
| | -----IVSGQ--------------------------------------------------------------- |
| | ---------------EE-----------------------------------KF |
| HsmCas7-11 | ------------EGKLTTE--NEHED--CTCILCRLFGNEHETGKVRFEDLE--------------------- |
| | -----LINDS--------------------------------------------------------------- |
| | ---------------AP-----------------------------------KR |
| FmCas7-11 | ------------DALLI----KSHED--CDCLLCEAFGSKHHEGKLRFEDLT--------------------- |
| | -----PKSDE--------------------------------------------------------------- |
| | ---------------IK-----------------------------------TYR |
| DpbaCas7-11 | ------------KNLSS----NLHED--CECLRCKIFGSKHQEGNIRFEDMT--------------------- |
| | -----VSQES--------------------------------------------------------------- |
| | ---------------EV-----------------------------------REKL |

Domains
.........................................................................................
........................
SECTION 7

| | |
|---|---|
| | D745 D758 G-rich loop |
| WmCas7x3 | HDMLAIDRFTGGGKDGAKFKLRYA-----ECPTLEGQLSLDLSRLRSARLD------GANAADTPWIALGLLT |
| | LVLRDLAEGDIPFGHGSAKGYGRCRAQGLPDRWRQALEAHFGPNADARALAALRAWCRTHATAAL--DAPCSL |
| | AGSAPTPAAAAPS--GQAAPAD---AFHN--PYHFI-P-F-SQPDIDRWLSPDA |
| SER16298.1 | HEMVAIDRFTGGGKEGAKFNVDYI-----ECPTLTGAIYLDLHRLKQAQLK------NDEDALKP--ALGLIS |
| | LLLRDLAEGDIAFGFGANKGYGQCREHAVLDNWEEKLKKIGAGLTIDGALQALRDTVALEPPAEF---PPEIE |
| | KTTDDNQPEAPDF--NLKPASN---GFHN--PYHFI-P-L-NNPKIGDWPEAKA |
| GwCas7x3 | HEMLAIDRFTGGGKDGAKFNVDYV-----ECPTLAGKLSLDLARLKNAKLK------GGKDALLP--ALGLMT |
| | LMLRDLAEGDIPFGYGISKGYGQCRASSALGDWAELLKQHLGADSADTTVQALREYLGNPKGQELKLDPPSAD |
| | ATQAGVPAQQNAAKTQAQGAQE---KFHN--PYHFI-P-L-SKPDISQWPEPQK |
| PID64649.1 | QEFVAIDRFHGGGKDEAKFNAAHY-----QAPVFKGKVRVS-QRVGN-DIS------WRK---------GLLA |
| | LIFRDLKEGDIYFGFGTNKGYGAVKKAEINPDGN-------ASDFSESDIEAFINKCREKKGLYNC--NPIKK |
| | PGKTKVSKNLPPAIVPLDRTDS---KFYN--PYHFI-P-V-KKPNTSSEAEKTA |
| WP_031436019.1 | QDFVAIDRFHGGGKDGAKFDATHF-----ERPEFEGAISFS-PRMANNDLD------WGK---------GLLA |
| | LVLRDMQEGDMTFGYGANKGYGGLESASITGIEQ-----------ITSDIQAFRDKCVASPQTWLCDEAVKPA |
| | NQQD----KIPPA--GIQVANS---GFHN--PYQFI-P-S-KEPDTGHWLPVLG |
| HEB50754.1 | QTFVAIDRFHGGCKEGALYTIRHA-----ESPRFEGHLVID-PRMPA----------WGR---------GLLA |
| | LVFRDLREGDITFGLGAGKGYGVVDAAVVQDMAE-----------LEPYVEAFREQCRQHQGMADCHSAPSPQ |
| | PLRDHDLAEIPPA---EEAPGE---TFLN--PYHFV-P-I-REPDTGSWLARDE |
| HreCas7-11 | CDHVAIDRFHGGTVHRMKYDDYPLPGSPNRPLRIKGNIWVK------RDLS------DTEK---------EAV |
| | KDVLTELRDGLIPLGANGGAGYGRIQRLMI-DDGPGW------------------LALPERKEDERPQPSFSP |
| | VS--------LGP-VHVNLKSGSDTADVYYYHPHYFL-E-PPSQTV--------- |
| CmaCas7-11 | IDHVAIDRFTGGGVEKMKFNDYPLSASPKNCLNLKGSIWIT------SALK-----DSEK---------EALS |
| | KALSELKYGYASLGGLSAIGYGRVKELTLEEN----------------------DIIQLTEITESNLNSQSRL |
| | S--------LKP-DVKKELSNN---HFYY--PHYFI-K-PAPKEV--------- |
| HvsCas7-11 | MDHVAIDRFTGGGVDQMKFDDYPLPGCPAQPLILEGKFWVK------DDID-----DESK---------SALE |
| | KAFADFRDGLVSLGGLGAIGYGQIGDFELIGGSADW------------------LNLPKPEENRTDVPCGDRS |
| | A--------QGP-EIKISLDAD---KIYH--PJFF;-K-PSDKNV--------- |
| SmCas7x3 | LDHVAIDRFDQSVVE--KYDDRPLVGSPKQPLVFKGCFWVQ------TSGMT----HQLT--ITCRPGDSISL |
| | TTVTGDIP--------PRP-ALTPPAG-----AIYY--PHYFLPPNP-EHKP--------- |
| oral_meta | IDHVSCSRFDASVVN--KFDDRSLVGSPDSPLFEGTFWLH------RDFQ-------ND---------VEIKT |
| | ALQDFADGLYSIGGKGGIGYGWLFDMEIPRSLRKLNSGFREA----------SSIQDALLDSAKEIPLSAPLT |
| | --------FTP-VKG---------AVYN--PYYYL-PFP-AEKP--------- |
| DisCas7-11 | FDHVAIDRFTGGAADKKKFDDSPLPGSPARPLMLKGSFWIR------RDVLED---EEYC---------KALG |
| | KALADVNNGLYPLGGKSAIGYGQVKSLGIKGDDKRI------------------SRLMNPAFDETDVAVPEKP |
| | K--------TDA-EVRIEAE-----KVYY--PHYFV-E-P-HKKV--------- |
| DsbaCas7-11 | FDHVAIDRFTGGAVNQKKFDDRSLVPGKEGFMTLIGCFWMR------KDKELS---RENI---------EELG |
| | KAFADIRDGLYPLGAKGSMGYGQVAELSIVDDEDSDDENNPAK----------LLAESMKNASPSLGTPTSLK |
| | K--------KDA-GLSLRFDEN---ADYY--PYYFL-E-P-EKSV--------- |
| SstCas7-11 | FDHVAIDRFTGGAVDKKKFDDCSLPGTPGHPLTLKGCFWIR------KELEKPDEDKSER---------EALS |
| | KALADIHNGLYPLGGKGAIGYGQVMNLKIKGAGD--------------------VIKAALQSESSRMSASEPE |
| | H--------KKP-DSGLKLSFDDKKAVYY--PHYFL-K-PAAEEV--------- |
| CsbCas7-11 | IDHVAIDRFTGGALDKAKFDTYPLAGSPKKPLKLKGRFWIK------KGFS-----GDHK---TEMPLPEEVE |
| | ESNNGPINNDY--------VHP-GHQSPQDHKNKNIYY--PHYFL-D-S-GSKV--------- |
| CjcCas7-11 | IDHVAIDRFHGGAEDKMKFNTLPLAGSFEKPIILKGRFWIK------KDIV-----KDYK---------KKIE |
| | DAMCDIRDGLYPIGGKTGIGYGWVTDLTILNPQSGFQ-----------------IPVKKDISPEPGTYSTYPS |
| | H--------STP-SLNKG-------HIYY--PHYFL-A-P-ANTV--------- |
| CbfCas7-11 | IDHVAIDRFTGGARDQMKFDTLPLIGSPERPLRLKGLFWMR------RDVS-----PDEK---------ARIL |
| | LAFLEIREGLYPIGGKTGSGYGWVSDLEFDGDAPEAFKEMNSK----------RGKQASFKEKISFRYPSGAP |
| | K--------HIQ-NLKAT-------SFYY--PHYFL-E-P-GSKV--------- |
| HvsCas7-11 | FDHVAIDRFLGGAKEKYKFDDKPIIGAPDTPIVLEGKIWVK------KDIN-----DEAK---------ETLS |
| | QAFSDINTGIYYLGANGSIGYGWIEEVKA-LKAPSWLKIK--------------EKPNFEKDTSLNISAIMNE |
| | F--------KKD-IQTLNLD-----KTYL--PYGFL-K-L-LEKV--------- |
| HsmCas7-11 | LDHVAIDRFTGGAKEQAKFDDSPLIGSPDSPLEFTGIVWVR------DDID-----EEEK----KSSQENVLS |
| | PVILSEVMDIEF--------NPP-KIDEN-------GVYF--PYAFL-R-P-LNEV--------- |
| FmCas7-11 | MDHVAIDRISGGAVDQCKYDDEPLVGTSKHPLVFKGMFWIN------RDSS-----VEMQ---------RALI |
| | AAFKEIRDGLYPLGSNGGTGYGWISHLAI-TNGPDWLNLEEVP----------LPQPTADIPVEECTAEPYPK |
| | F--------QKP-DLDQN-------AVYY-PHYFL-Q-P-GKPA--------- |
| DpbaCas7-11 | FDHVSIDRFTGGAANKLKFDDKPLVG---NPLVFQGVFWVH------QSIGNN---EKTQ---------EALS |
| | DAFKDVRDGLYPVGAKGSIGYGWIKGIEV-VEGPDWLK----------------DALSAEKTVEAGIASEESE |
| | Y--------KLP-DLPWISLLPKGRAIYN--PHYFL-GIP-KVTP--------- |

Domains
.........................................................................................
........................
SECTION 8

| | |
|---|---|
| | E959 |
| WmCas7x3 | H---RKTGGH-SRYRG--------------LSGRLVCALTTVTPLFVGAAA-RTP-ASDQHPK---------- |
| | P----VAGFALQNQPAIPATSLRGLLSSLFESISGSNLRVLHPT-PYSIRKTTKE---------------ALS |
| | A--I-----------------G-------------------------------- |
| SER16298.1 | ETLKANREGH-DQYHTGK------------FSGRIVCSLTTQTPLFIGAET-KPS-TSDREPS---------- |
| | E----ARPFKLNGKHAIPATSLRGMLSSLFESVSNSNFRVLHPE-HYSVRKSLDDYV-------------ALS |
| | A--M-----------------G-------------------------------- |
| GwCas7x3 | L--TEKGHSH-DRYAS--------------LSGRIVCRLTTQTPLFIGSEQ-TTP-TNPQAPK---------- |
| | S----LHPFKLNNGLAIPATSLRGMISSLFESVSNSNFRVLDEK-TYSMRKTMQQ---------------SLS |
| | A--M-----------------G-------------------------------- |
| PID64649.1 | FGTADSPHSH-GFYRKQTNE------QQPLYSGRLICMLTSETPFFIGAQA-ESD---PTENE---------- |
| | NQASLRHPYQLDGEPAIPSTSLRGLISTMTEAAANCAMRVLDSE-IISYRKMPNPSH-------------ISL |
| | A--L-----------------G-------------------------------- |
| WP_031436019.1 | L-NADSHHSH-AFYRDQTDN------GEKLYHGRLICCLNTETPIFIGADK-KKD-TEPAEIN---------- |
| | N-------YRLNGELAIPATSLRGMISSLAEAASNSAMRVLDNG-LLSYRKTADD---------------ALR |
| | K--V-----------------G-------------------------------- |
| HEB50754.1 | L-DSSCCHSH-GFYRQQVDD-------RPLYHGRLTCLLETETPLFIGATG-DSS-V-PSRIE---------- |
| | N-------UYRLGNRIAIPAASLRGMLSSLAEAASNSAMRVLHQG-ILSYRKKAKN---------------AL |
| | RE--I-----------------G-------------------------------- |
| HreCas7-11 | S-RELDIISHARTRDS---G------GEALLTGRILCRLITRGPIFIPDTN-NDNAFGLEGGI-G------HK |
| | N----YRFFRINDELAIPGSELRGMVSSVYEALTNSCFRIMEEGRYLSRRMGADEFK---------------- |
| | DFHP-----------------G-------------------------------- |
| CmaCas7-11 | V-RESRLISHVQGHDT---E------GEFLLTGKIKCRLQTLGPLFIANNDKGDDYFELQHNNPG------HL |
| | N----YAFFRINDHIAIPGASIRGMISSVFETLTHSCFRVMDDKKYLTRRVIPESETTQKRKSGRYQVEESDP |
| | DLFP-----------------G-------------------------------- |
| HvmCas7-11 | Y-RERELVSHAKKKGP---D------GKSLFTGKITCRLSTEGPVFIPDTDLGEDYFEMQASHKK------HK |
| | N----YGFFRINGNVAIPGSSIRGMISSVFEALTNSCFRVFDQERYLSRSEKPDPTE--------------LT |
| | KYYP-----------------G-------------------------------- |
| SmCas7x3 | K-RSDKIIGH-HTFAT---D-------PDSFTGRITCKLEVVTPLIVPDTE-G------EQPKDQ------HK |
| | N----FPFFKINDEIMLPGAPLWAAVSQVYEALTNSCFRVMKQKRFLSWRMEAEDYK---------------- |
| | DFYP-----------------G-------------------------------- |
| oral_meta | E-RCLVPPSH-ARLQS---D---------RYTGCLTCELETVSPLLLPDTC--------REKDGN------YK |
| | E----YPSFRLNNTPMIPGAGLRAAVSQVYEVLTNSCIRIMDQGQTLSWRMSTSEHK---------------- |
| | DYQP-----------------G-------------------------------- |
| DisCas7-11 | E-REEKPCGH-QKFHE---G---------RLTGKIRCKLITKTPLIVPDTS-NDDFFRPADKEARKEKDEYHK |
| | S----YAFFRLHKQIMIPGSELRGMVSSVYETVTNSCFRIFDETKRLSWRMDADHQN--------------VL |
| | QDFLP-----------------G-------------------------------- |
| DsbaCas7-11 | H-RDPVPPGHEEAFRG---G---------LLTGRITCRLTVRTPLIVPNTE-TDDAFNMKEKAGK-KKDAYHK |
| | S----YRFFTLNRVPMIPGSEIRGMISSVFEALSNSCFRIFDEKYRLSWRMDADVKE--------------LE |
| | QFKP-----------------G-------------------------------- |
| SstCas7-11 | N-RKPIPTGH-ETLNS---G---------LLTGKIRCRLTTRTPLIVPDTS-NDDFF--QTGVEG------HE |
| | S----YAFFSVNGDIMLPGSEIRGMLSSVYEALTNSCFRVFDEGYRLSWRMEADRVN--------------LM |
| | QFKP-----------------G-------------------------------- |
| CsbCas7-11 | Y-REKDIITH-EEFTE---E---------LLSGKINCKLETLTPLIIPDTS-DENGLKLQGNKPG------HK |
| | N----YKFFNINGELMIPGSELRGMLRTHFEALTKSCFAIFGEDSTLSWRMNADEKD---YKIDSNSIRKMES |
| | QRNPKYRIPDELQKELRNSGNGLFNRLYTSERRFWSDVSNKFENSIDYKREILR |
| CjcCas7-11 | H-REQEMIGH-EQFHK---E----QKGELLVSGKIVCTLKTVTPLIIPDTE-NEDAFGLQNTYSG------H |
| | KN----YQFFHINDEIMVPGSEIRGMISSVYEAITNSCFRVYDETKYITRRLSPEKKD--ESNDKNKSQDDA |
| | SQKIRK-----------------G-------------------------------- |
| CbfCas7-11 | I-REQKMIGH-EQYYE---SYPSGASGEKLLSGRIICSMTTHTPLIVPDTG------VIKDPENK------H |
| | AT----YDFFQMNNAIMIPGSEIRGMISAVYEAMTNSCFRIFHEKQYLTRRISPEDKE-------------- |
| | LREFIP-----------------G-------------------------------- |
| HvsCas7-11 | K-RTSSPITH-ERFYE---N---------HLTGFIECSLKVLSPLIIPDTE------TPEKEENG------HK |
| | Y----YHFLKIDNKPIIPGAEIRGAVSSIYEALTNSCFRVFGEKKVLSWRMEGKDAK---------------- |
| | ERMP-----------------G-------------------------------- |
| HsmCas7-11 | K-RTREPIGH-NEWKK---S---------LISGYLTCRLELLTPLIIPDTS--EEVIKEKVNNGE------HP |
| | V----YKFFRLGGHLCIPAAEIRGMISSVYEALTNSCFRVFDEKRLISWRMTAEEAK---RPDPKKSEEQNRM |
| | RFRP-----------------G-------------------------------- |
| FmCas7-11 | E-RERHPVSH-DHIDD---K---------LLTGRLVCTLTTKTPLIIPDTQ-TNTMLPPNDAPEG------HK |
| | S----FRFFRIDDEVLIPGSEIRGMVSTVFEALTGSCFRVINQKAHLSWRINADMAK---------------- |
| | HYRP-----------------G-------------------------------- |
| DpbaCas7-11 | E-REREPVGH-DRFQT---D---------LHTGRIICTLKTITPLIIPDTE-NDKAFEVENASAD------HE |
| | R----FKFMRMGSQAAIPGSAIRSMTSSVFEALTNSCFRVLDQKSHLSWRMEADDAG---------------- |
| | DYKP-----------------G-------------------------------- |

Domains
........................................................................................
........................
SECTION 9

| | |
|---|---|
| | D998 |
| WmCas7x3 | -----------RIVERNGELKLYPL---------------TLPTIHQNA-DNAY-----------PVPA---- |
| | ------RWRKVF-YWESPV------------------------------------------------------ |
| | ------------------------------------------------------ |
| SER16298.1 | -----------RIVDDQGELKLQPL---------------TLPTLFGNR----N-----------NVPA---- |
| | -----KWEKIFGTPSEDD------------------------------------------------------- |
| | ----------------------------------------------------- |
| GwCas7x3 | -----------RIVRHDQKLYLLPL---------------TLPTLPQGP-HGVY-----------DLGE---- |
| | ------KWSAVF-DWQP-P------------------------------------------------------ |
| | ------------------------------------------------------ |
| PID64649.1 | -----------MVTKRGEDFWLIPL---------------AMPALSLNDEEHNY-----------KLDK---- |
| | ------RYRTMF--PDGLA------------------------------------------------------ |
| | ------------------------------------------------------ |
| WP_031436019.1 | -----------MVIYVDNKSFIIKL------------------------------------------------ |
| | ---------------NDAI------------------------------------------------------ |
| | ------------------------------------------------------- |
| HEB50754.1 | -----------MIVLRDGKRFILPL----------------VPLM---------------------------- |
| | ----------------EVT------------------------------------------------------ |
| | ------------------------------------------------------- |
| HreCas7-11 | -----------IV---VDGAKIREM---------------KRYRLPLYD-T--P-----------DKTS---- |
| | ------RTKEMT-CPELFTRKDG-------------------------------------------------- |
| | ------------------------------------------------------ |
| CmaCas7-11 | -----------RVQKKGNKYKIEKM---------------DEIVRLPIYD-N--F-----------SLVE--- |
| | -------RIREYH-YSEECASYVP------------------------------------------------- |
| | ------------------------------------------------------- |
| HvmCas7-11 | -----------KVKRDGNKFFILKM--------------KDFFRLPLYD-F--------------DFEG---- |
| | ------EAESLR-PNYDEDRNEEENKGKNKNTQ--------------------------------------- |
| | ------------------------------------------------------- |
| SmCas7x3 | -----------RV--LDGGKQIKKMG--------------DKAIRMPLYD-D--S-----------TATG--- |
| | -------SIKDDQ-LISDCCPKSDE------------------------------------------------- |
| | ------------------------------------------------------- |
| oral_meta | -----------KI--TDNGRKIQPMG-------------KQAIRLPLYD-E--VIHHVSTPGDTDDLEKLKAI |
| | VLELTRPWKELP-EEQKKKRFEKCKNILDGRMLQQKELRALENSGFAYWRDKTSLTFDSFLKDAIEQEYPRYS |
| | GDYQRIKALVVNITLPWKLLKKEERHKRFDKCRRILKGQQPLTKDERKALEESG |
| DisCas7-11 | -----------RV--TADGKHIQKF--------------SETARVPFYD-K--TQKHFDILDEQEIAGE---- |
| | ------LPVRMW-VKRFIKRLSLVDPAKHPQKKQDNKWKRRKEGI---------------------------- |
| | ------------------------------------------------------ |
| DbsaCas7-11 | -----------RV--ADDGKRIEEM---------------KEIRYPFYD-R--T-----------YPER---- |
| | ------NAQNGY-F-RWDARISLTDNSMRKM-EKDG-VPRNVIYKLNTLKNKAYKSEKSFLFDL--------- |
| | ------------------------------------------------ |
| SstCas7-11 | -----------RV--TDNGLRIEEM---------------KEYRYPFYD-R--D-----------CSDK---- |
| | ------KSQEAY-FDEWERSITLTDDSLEKMARKGDISPKDLKVLKSLKGKNYKSTEGLLAAF---------- |
| | ---------------------------------------------- |
| CsbCas7-11 | CAGRPKNYKGGIIRQRKDSLMAEEL---------------KVHRLPLYD-N--F-----------DIPD---- |
| | --------SAYK-ANDHCRKSATCSTSRGCRERFT-------------------------------------- |
| | ------------------------------------------------------ |
| CjcCas7-11 | -----------LVKKTDEGFSIIEVERYSMKTKGGTKLVDKVYRLPLYD-S--E-----------AVIA---- |
| | ---------SIQ-FEQYGEKNEKRNA----------------------------------------------- |
| | ------------------------------------------------------ |
| CbfCas7-11 | -----------IVRIINGDVYIEKA--------------EREYRLPLYD-D--V-----------HIIT---- |
| | -------NYEELE-YEKYIKKNPGREQ---------------------------------------------- |
| | ------------------------------------------------------- |
| HvsCas7-11 | -----------RVSKKKGKLYMVKM---------------QALRLPVYD-N--P-----------ALAN---- |
| | ------EIRSGS-IYE--------------------------------------------------------- |
| | ------------------------------------------------------ |
| HsmCas7-11 | -----------RIIKKDKKFYAQEM---------------LELRIPVYD-N--K-----------D------- |
| | ------KRNEIS-QNDPTRPS---------------------------------------------------- |
| | -------------------------------------------------------- |
| FMcAS7-11 | -----------RIIQNNEKMFIQPY---------------KMFRLPFYA-G--F------------------- |
| | ------------------------------------------------------------------------- |
| | --------------------------------------------------------- |
| DpbaCas7-11 | -----------RFEKKDDKAVIRKF---------------KKKARFPFYA-G--P------------------ |
| | ---------------------------------------------------------- |

Domains
.........................................................................................
........................
SECTION 10

| | |
|---|---|
| WmCas7x3 | --------------------PLRVY----FGS-R--------KQTYDS-R---QP-----HYLP-IQELS-Y- |
| | --------------LPND---SDCI------APDQGDLRFPSRDRDRKFLIGQCPISRYDCPIPETDLP---- |
| | --KLSPQERPRY-----TR--GWVR--SLWTS-----NREK----ELPHTVK-H |
| SER16298.1 | --------------------FLRIY----FDDIP--------SKFSSN-K---RY-----FYNCKATELKDF- |
| | --------------IKSD---KYFIG---KRTPTV----FPKSSTEKSHLESLEFID--VEKFKKAVEN---- |
| | -LEITPGNNPY-----IH--GWVR--NLKDE-----FRE-----DIPDNVK-H |
| GwCas7x3 | --------------------PLRIY----FDPPP--------RRTYQS-Q---QP-----CYMK-LSTVK-Y- |
| | --------------SESN---PNQI----IAGENLGALRFPRGNQNTQFLIGQSNQD--ECPITQAEYA---- |
| | --QKSEDERNEY-----TS--GWVR--TLVKP-----GR------DLPRSVK-H |
| PID64649.1 | --------------------KLKVYLEKAYSNNV--------MKTFLN-N---EN-----TWTLAQSKIH-Y- |
| | --------------LPLT---PIQMQ---NGGINSYYNNLRTPSRSNNFLIGQTVAH--GNGIPASGPG---- |
| | --AGMVP--------------GILR--ILGKE-----HRQN----DLPQNKK-H |
| WP_031436019.1 | --------------------KLKQT----YTPGN--------NKDFIE-K---SN-----SWSPEHNTVY-Y- |
| | --------------LD-------------------------------------------NNQIPQESYM---- |
| | --NGMKP--------------GILR--ILGKE-----GREQ----EL-ENKL-H |
| HEB50754.1 | --------------------KLRHA----YTDPA--------MKHFLD-D---KN-----SWSPRCNRVY-Y- |
| | --------------LGRD-----------------------------------------GNQIPAETRG---- |
| | --AGMRP--------------GILR--LLGRE-----GRHD----AL-QNKK-H |
| HreCas7-11 | --------------------RPERA----KKFNEEIAKVAVQNRAYLL-SLDEKERR---EVLLGNREVT-FD |
| | ECPDDEYSDDEYSELKYAQKYKDFIAVLKKNGQKRGYIKFTGPNTAN-------------------KKN---- |
| | ----RS--DWDP--DKLNI------LLESDPECRVSN--IH |
| CmaCas7-11 | --------------------SVKKA----IDYNRMLAQAADSNREFLY-NHPEAK-----SILQGKKEVY-Y- |
| | ILHKQESKNRGKTKEINPNARYACLTDENTPGSRKGFIKFTGPDMVT-------------------VNK---- |
| | --ELKSKIAPIYDPEWEKDIPDWERSNQESNHKYSFILHNEIEMRSSQKK---- |
| HvmCas7-11 | --------------------KVKNA----VEFNIKMAGFAKHNRDFLK-KYKEQEIK---DIFMGKKKVY-F- |
| | ------TAGKHKPNEAHDNDKIALLTKGSNKKAEKGYFKFTGPGMVN-------------------VKA---- |
| | --GVEGEECDFHIDESDPDV-YWNMS--------SILPHNQIKWRPSQKK---- |
| SmCas7x3 | --------------------KLQKA----LATNQKIALAAKHNQEYLA-QLSPDERE---EALQGLKKVS-F- |
| | -------WTESLANNEAPPFLIAKLGEERGKPKRAGYLKITGPNNAN-------------------IAN---- |
| | ---TNNPDDGGY-----IP--SWKD--QFDYS-----FRLLGPPRCLPNTKGNR |
| oral-meta | FANWHGRELLFDRFLKDENSCLIKA----ETTDRVIASVAKNNRDYLF-EIKQQDFARYKRIIQGLERVP-F- |
| | -------SLRSLAKSKETSFQIACLGLRRGRFLRKGYLKISGPNNAN-------------------VEI---- |
| | --SGGSHSNSGY-----SD--IWDD--PLDFS-----FRLSGKSELRPNTQKTR |
| DisCas7-11 | --------------------ATFIE----QKNGSYYFNVVTNNGCTSF-HLWHKPDNFDQEKLEGIQNGE-K- |
| | ----LDCWVRDSRYQKAFQEIPENDP--DGWECKEGYLHVVGPSKVE-------------------FSDKKGD |
| | VINNFQGTLPSV-----PN--DWKT--IRTND-----------FKNRKRKNE-- |
| DsbaCas7-11 | -GRYKKLVLKHAEVRGGEIPYYSHP----TPTDCKLLSLVGPNRQLCR-QDTLVQYRIIKHRRGAKPEED-F- |
| | -----MFVGTPSENQK-----GHEKN----NDHGGGYLKISGPNKIE-------------------KEN---- |
| | ---VLTSGVPSV-----PE--NMGA--VVHNCPP---RLVEVTVRCGRKQEEEC |
| SstCas7-11 | GGNILGLIFKYAE-RIGDVPRYEHP----TDTDRMMLSLSEYNRNQ-K-SDGKRAYKIIKPASKLGKGAY-F- |
| | -----MFAGTSVENKRICNPACTDKA----NKSVKGYLKISGPNKLE-------------------KYN---- |
| | ---ISEPELDGV-----PE--DRNCQIIHNRI-----YLRKIFVANAKKR---K |
| CsbCas7-11 | -------------------CGIKV----NSKVITGSERSPIDVIAEL--NERGRQTGFIKLSGLNNSN----- |
| | --------------KSQ---------GNTGTTF-----NS--GWDR--FELNI-----LLDDLETRPSKSD-- |
| | -- |
| CjcCas7-11 | -------------------KIRAA----IKRNEVIAEVARKNLIFLR-SLTPEELK---KVLQGEILVK-F-- |
| | --------SLKSGKNPNDYLAELH---ENGTERGLIKFTGLNMVN-------------------IKN------ |
| | V--NEEDKDF-----ND--TWDW--EKLNI-----FHNAHEKRNSLKQ---- |
| CbfCas7-11 | --------------------KIKNA----HRFNKNIARIAESNRNYLC-SLDRAVRR---EILSGRKKVN-F- |
| | -------RLVKVNDNKNPDKEAVELC---KTGPLEGLVKFSGLNAVN-------------------ISN---- |
| | --LRPGTAEEGF-----DA--KWDM--WSLNI-----ILNRMDVRNSQKK---- |
| HvsCas7-11 | --------------------KYKN-----SKVEIIFFQTVEGIRKFLRGNFNNVEWKK--VLVTGIDPLA-I- |
| | ---------LPSQKIPGNDKWVKNLQ--SKISPVRGYFKFTGPNKIE-------------------TKRREEE |
| | KDEKLRTKANKVSCLQ-KD--KWYE--AMHNHVE---YKQDYTPPNSPKTEP-L |
| HsmCas7-11 | --------------------EYNHP----TEPERIFFSNAEKIRNFLK-RNS--------NYLHGSTPLL-F- |
| | -----RQWSISNRYDIKA----------LIGNKSQGHLKFTGPNKIE-------------------VSE---- |
| | -----GTKCPKYETIPGRD--WEDK--AVHNYVEPGKFVTVISRKKGQKPKA-V |
| FmCas7-11 | ----------------------------------------DPRNCLSE------------KQLLGIEPVK-L- |
| | -------WVKDFVASLVKPQTDIDIE----WKEKIGFVRVTGPNKVE-------------------VDS---- |
| | -SNTPDPSLPEC-----ES--DWKD--IHTE--------DGSTPSKNDR---- |
| DpbaCas7-11 | ----------------------------------------DTREAFTS------------DQIMGKEKVT-L- |
| | -------WVKDFEASLTVPDE-------IGWKKKRGYLKVTGPNKVE-------------------IDT---- |
| | --ENISENNPSP-----PD--SWQD--VRIND--------DGTIPDKKNR---- |

Domains
.........................................................................................
........................
SECTION 11

| | |
|---|---|
| WmCas7x3 | QLFI--PDPVE--TPAA--DDL--------------------------LPIP-QGV-LDTFHALADLALAGQH |
| | ----W-GKDE-TPADD-QLLPFTPAGRQR----HDA---DRPPRDADRQTRLQPGDLVCFD--LG-------D |
| | -------DGAVSEISFSSIWREGLRLAG-KPN-LATTADLLAQ-----------V |
| SER16298.1 | HVFL--PDTTKRVSP---------------------------------LEIP-PHV-KKRFHELADLALAGLH |
| | ----L-KQGE-TIASPYKILPYTPIGRNK----LENHIHRVPNDLTCYMTRLKKGDLVFFD--VD-------N |
| | -------DGQITEISFSSIWRAGI---GTKNK-LQTTADLLSQ----------R |
| GwCas7x3 | HVFL--PDVFIDAPPPV--NDL--------------------------DSD----------CRDTRLQAGDLI |
| | FFD--IDPPLHPG-E-------KSQITEISFSSIWRSGI---G-KDH-LLTTPDLLTN----------F |
| PID64649.1 | ELFI--PVPDAFVADPK--TFLD---------------------TATAFLIP-RNV-IDAFEKIAEKQTQSQK |
| | QDK-L-KHDE-------ERLPFHLKGTRR----QEN-----------HTLQIKTGDLVYFR--PN-----A-K |
| | -------GDEVEEIAFSSIWRGKT---------SGTTADFFPD----------K |
| WP_031436019.1 | ELFI--PVPLEYVDTEN--NKFDYQAYKK-------A------FLYRAIEPI-EPV-LKRYSELADQRTMSQK |
| | SNEKL-KKDD-TCQSV-GWLPFHLKGTKR----QLD------DKHNVGKLQIDEYDLIYYE--AS-------- |
| | -------GKEVTEVAFSSIWRGRV---TENSS-QANKVYSFIP----------G |
| HEB50754.1 | EYFI--EIPERYVD-QD--HCFDYRMFIR-------D------RARNGTLVPISPVAWERYHCLAEERTLSQK |
| | NDPEL-REDK-ACASLP-KWLPFHPKGRVR----ERD------PENDVCHLSLRHGDLVFYA--EQ------- |
| | --------NRVVSEISFSAIWRSRV---ETSDSYQAVTVDCFVP----------K |
| HreCas7-11 | CYPR--PLLVC----IK--DKAEYRIHKRCEAIFCSI-----GSPSDLYDIP-QKV-SNQYRTIL----QDYN |
| | DNTGK--IVE--IF-------------RTQ----IKH-----------DQ--LTTGDLVYFK--PA------- |
| | A-------NGQVNAVIPVSISRKTD---------ENPLAKRFKN----------D |
| CmaCas7-11 | KYPR--PVFIC----KK--NGVEYRMQKRCERIFDFT---KEEEKDKEIVIP-QKV-VSQYNAIL----NDNK |
| | ENTET--IPG-LF-------------NSK----MVN-----------KE--LEDGDLVYFK--YK-------- |
| | -------EGKVTELTPVAISRKTD---------NKPMGKRFPKISINGKMKPND |
| HvmCaS7-11 | EYPR--PVLKC----VK--DGTEYVMLKRSEHVFAEA------SSEDSYPVP-GKV-RKQFNSIS----RDNV |
| | QNTDH--LSS-MF-------------QSR----RLH-----------DE--LSHGDLVYFR--HD-------E |
| | -------KRKVTDIAYVRVSRTVD---------DRPMGKRFKN----------E |
| SmCas7x3 | EYPR--PGFTC----VI--DGKEYSLTKRCERIFEDI--SGGENQVVRAVT-ERV-REQYREIL----ASYRA |
| | NAAG--IAE-GF-------------RTR----MYD-----------TE-ELRENDLVYFKTAKQ-----ADG- |
| | ------KERVVAISPVCISREAD---------DRPLGKRLP-----------A |
| oral_meta | EYPR--PSFTC----TV--DGKQYTVNKRCERVFEDS-------AAPAIELP-RMV-REGYKGIL----TDYE |
| | QNAKH--IPQ-GF-------------QTR----FSS-----------YR-ELNDGDLVYYK--TD-------S |
| | -------QGRVTDLAPVCLSRLAD---------DRPLGKRLP-----------E |
| DisCas7-11 | ------PVFCC----ED-DKGNYYTMAKYCETFFFDL------KENEEYEIP-EKA-RIKYKELL----YVYN |
| | NNPQA--VPESVF-------------QSR---VARE-----------NVEKLKSGDLVYFK--HN-------- |
| | -------EKYVEDIVPVRISRTVD---------DRMIGKRMS-----------A |
| DsbaCas7-11 | KRKRLVPEYVC----ADPEKKVTYTMTKRCERIFLEK-------SRRIIPFT-NDA-VDKFEILV----KEYR |
| | RNAEQQDTPE-AF-------------QTI----LPE-----------NG-TVNPGDLLYFR--EE-------- |
| | -------KGKAAEIVPVRISRKVD---------DRHIGKRID-----------P |
| SstCas7-11 | ERDRLVGEFAC----YDPEKKVTYSMTKRCERIFIKD-------RGRTLPIT-HEA-SELFEILV----QEYR |
| | ENAKRQDTPE-VF----------P---QTL----LPD----------NG-RLNPGDLVYFR--EE-------- |
| | -------KGKTVEIIPVRISRKID---------DISPGKRLR-----------E |
| CsbCas7-11 | -YPR--PRLLF----TD--DQYEYNITKRCERVFEID-----KGNKTGYPVD-DQI-KKNYEDIL----DSYD |
| | GIKDQ-EVAE-RF-------------DTF----TRG-----------SK--LKVGDLVYFH--ID-------G |
| | -------DNKIDSLIPVRISRKCA---------SKTLGGKLD-----------K |
| CjcCas7-11 | GYPR--PVLKF----IK--DRVEYTIPKRCERIFCIP-----VKNTIEYKVS-SKV-CKQYKDVL----SDYE |
| | KNFGH--INK-IF-------------TTK----IQK-----------RE--LTDGLDVYFI--PN-----EGA |
| | -------DKTVQAIMPVPLSRITD---------SRTLGERLPH----------K |
| CbfCas7-11 | EYPR--PALHF----NH--DGKEYTIPKRCERVFVRAEAGKRAETEGSYKVP-RKV-QEQYQNIL----RDYE |
| | SNIGH--IDN-TF-------------TRL----IEN-----------CG--LNNGSLVYFK--PD-----N-S |
| | -------RKEVVAITPVKISRKTD---------RLPQGDRFPHTS--------S |
| HvsCas7-11 | ERPRNIPCFVC----SD--KEKIYRMTKRCERVFVSL-----GENAPKYEIP-ISA-IKRYEVIL----SAYR |
| | ENWERNKTPE-LF-------------RTR----LPG-----------DGRTLNEDDLVYFR--AD-------E |
| | -------NEKVKDIIPVCISRIVD---------EVPLIKRLS-----------Q |
| HsmCas7-11 | QRRRNVPAFCC----YDYNTNRCFVMNKRCERVFKVS------RDKPKYEIP-PDA-IRRYEHVL----RKYR |
| | ENWERYDIPE-VF-------------RTR----LPG-----------DGETLNEGDLVYFR--LD-------E |
| | -------NNRVLDIIPVSISRISD---------TQYLGRRLP-----------D |
| FmCas7-11 | -------VYRC----QL--KGVTYTVAKWCEAFWVKD------EGKKPITVN-AEA-INRYHLIM----KSYQ |
| | DNPQS--PPI-IF-------------RSLPVLNYKQ-----------DQKII--GSMIFYR--ES-----AKS |
| | -------DKIVNEIIPVKISRTAD---------TALLAKHLPN----------N |
| DrbaCas7-11 | -------KFIC----QY--GTTTYTVDKWCEAFFCDE-------EDKPYELA-PDV-ERKYRLLM----DSYH |
| | NNPQA--PPQ-IF-------------RSLPLFSETG-----------PKKTLEHGDLVYFRLSEV-----NKQ |
| | SQSKKQVRERVTDIVPVSISRIAN---------NQPIGKHIA-----------A |

Domains
.........................................................................................
........................
SECTION 12

| | |
|---|---|
| WmCas7x3 | SPHLLPLG--------------------------MPGRS-A-----RLSPVEQLFGVVEYRPPQTAK--GTRK |
| | PTDAPAAYALAGKLQVGFGRP---ARPF-----------ER-------EP-AVTLKELSTPKPPSPALYFRPK |
| | A--GDGYVSKAKLASQ--------------PQ----DYAPAGRKHYLH--ALRR |
| SER16298.1 | DPNLVQLG--------------------------MGVRT-KNTDRFKLSPAERLFGVVEHRDDDNTTVENVNQ |
| | PNDKAQAFAFAGKVRIGFGLP---DKKT-----------TV-----NGVS-PVTLKELSSPKPPSPAFYLKRK |
| | N--NDDFVSKKVAAEC--------------SE----TMTLRGRKCYLH--AWRE |
| GwCas7x3 | DVNLQPHG--------------------------MPGRT-Q-----SLSPAELLFGLVGTQNDQATT------ |
| | --------AYAGKVRIGFGLP---EEGH-----------NP-----RLDA-RITLKELSSPKPPSPALYFRKK |
| | SG-KDEYVSKANLADK--------------PE----DYILRGRKMYLH--AWRK |
| PID64649.1 | E--LLPFN--------------------------RNRS--------RVSPAELLFGFTENNPKEMKI------ |
| | D----RGLAFAGKIRISAGTL---SDKF-----------SDTTESDLFEP-ETTLKALSSPKPPSPALYFKEK |
| | KS-GTQYIKKQDL--N--------------PG----KHEIQGRKIYLH--ALRN |
| WP_031436019.1 | E--LLPFN--------------------------ESRK--------KVSPAELLFGFTQINKDGSKA------ |
| | DD---KAQAFAGKVRISAGTI---SEYP-----------EN--EANLLEQ-EVTLKALSTPKLPSPALYFRTI |
| | NGNGSAYISKQEL--E--------------PS----KHLAKGRKYYLH--ALRT |
| HEB50754.1 | E--LRPFN--------------------------RDRR--------AISPAELLFGFVELDESEHST------ |
| | EKSRYEQMAFAGKVRLSAGLP---VEDV-----------ED---SALLEPKPIVLKALSSPKPPSPPFYFVMR |
| | DG-SGAYIAKKDL--S--------------PD----RHRIKGRKHYLH--GLRQ |
| HreCas7-11 | S--LRPCA-GLCVE----DCNECPARCKK-VADYFNPHP-R-----GLCPACHLFG---------TT------ |
| | --------FYKGRVRFGFAWLTGEDGAPRWYKGPD----PC--DSG-KGR-PMTIPLLERPRPT-----WSIP |
| | D--------------N--------------------SFDIPGRKFYVHHP-YSV |
| CmaCas7-11 | S--LRSCS-HTCTE----DCDDCPNLCES-VKDYFKPHP-D-----GLCPACHLFG---------TT------ |
| | --------FYKSRLSFGLAWL---ENNAKWYISNDFQQKDS--KKE-KGG-KLTLPLLERPRPT-----WSMP |
| | N--------------N--------------------NAEVPGRKFYVHHP-WSV |
| HvmCas7-11 | S--LRPCN-HVCVE----GCDECPDRCKE-LEDYFSPHP-E-----GLCPACHLFG---------TT------ |
| | --------DYKGRVSFGLGWH--ESNTPKWYMP------ED--NSQ-KGS-HLTLPLLERPRPT-----WSMP |
| | N--------------K--------------------KSEIPGRKFYVHHP-WSV |
| SmCas7x3 | G--FQPCS-HVCLE----DCNTCSAKNCP-VPLYREGWPVN-----GLCPACRLFG---------AQ------ |
| | --------MYKGRVNFGFARL------P-----------DD--KQP-ETK-TLTLPLLERPRPT-----WVLP |
| | K--------------SV-------------KGSNTEDATIPGRKFYLRHDGWRI |
| oral_meta | E--YRPCA-HVCLE----ECDPCTGKDCP-VPIYREGYPAR-----GFCPACQLFG---------TQ------ |
| | --------MYKGRVRFSFGVP---VN-------------ST--RSP-QLK-YVTLPSQERPRPT-----WVLP |
| | E--------------S----------------CKGKEKDVPGRKFYLRHDGWRE |
| DisCas7-11 | D--LRPCH-GDWVE----DGDLSALNAYP-EKRLLLRHP-K-----GLCPACRLFG---------TG------ |
| | --------SYKGRVRFGFASL---ENDPEWLIPGK---NPG--DPF-HGG-PVMLSLLERPRPT-----WSIP |
| | G--------------S--------------DN----KFKVPGRKFYVHHHAWKT |
| DsbaCas7-11 | E--LRPCH-GEWIE----DGDLSKLDAYPAEKKLLTRHP-K-----GLCPACRVFG---------TG------ |
| | --------SYKSRVRFGFAAL---KGTPKWLKED-----PA--EPS-QGK-GITLPLLERPRPT-----WAVL |
| | H--------------ND-------------KE----NSEIPGRKFYVHHNGWKG |
| SstCas7-11 | D--LRPCH-GEWIE----GDDLSQLSEYP-EKKLFTRNT-E-----GLCPACRLFG---------TG------ |
| | --------AYKGRLRFGFAKL---ENDPKWLMKN-----SD--GPS-HGG-PLTLPLLERPRPT-----WSMP |
| | D--------------DTLNRLKKDGKQEPKKQKGKKGPQVPGRKFYVHHDGWKE |
| CsbCas7-11 | A--LHPCT-GLS----------------------------D-----GLCPGCHLFG---------TT------ |
| | --------DYKGRVKFGFAKY---ENGPEWLI-------TR--GNN-PER-SLTLGVLESPRPA-----FSIP |
| | D--------------D--------------------ESEIPGRKFYLHHNGWRI |
| CjcCas7-11 | N--LLPCV-HEVN-----EGLLSGILDSL-DKKLLSIHP-E-----GLCPTCRLFG---------TT------ |
| | --------YYKGRVRFGFANL---MNKPKWLT-------ER--ENG-CGG-YVTLPLLERPRLT-----WSVP |
| | S--------------D--------------------KCDVPGRKFYIHHNGWQE |
| CbfCas7-11 | D--LRPCV-RDCLDT---EGDIRMLENSP-FKRLFHIHP-E-----GLCPACQLFG---------TT------ |
| | --------NYRGRVRFGFASL---SDGPKWFR-------KD--EGN-ETC-HITLPLLERPRPT-----WSMP |
| | D--------------D--------------------TSTIPGRKFYVHHMGYET |
| HvsCas7-11 | E--LWPCVLAECPLLGF-ECKKCELEGLP-EKIWFRINK-D-----GLCPACRLFG---------TQ------ |
| | --------IYKSRVRFSFAYA------KNW--------------KF-YDG-YITLPRLESPRAT-----WLIL |
| | K--------------E--------------KDKHYIKYKVCGRKFYLHNSTYED |
| HsmCas7-11 | H--LRSCV-RECLYEGWGDCKPCKLSLFP-EKMWIRINP-E-----GLCPACHLFG---------TQ------ |
| | --------VYKGRVRFGRARA-----GSNW--------------KF-REE-QLTLPRFETPRPT-----WVIP |
| | K--------------R--------------KD----EYQIPGRKFYLHHNGWEE |
| FmCas7-11 | D--FLPCA-ATCLN----ECDTCNAKTCKFLPLYREGYPVN-----GLCPSCHLFG---------TT------ |
| | --------GYQGRVRFGFAKM---NGNAKFCQ-------GG--ERP-EDR-AVTLPLQERPKLT-----WVMP |
| | N--------------E--------------------NSTIPGRKFFLHHQGWKK |
| DpbaCas7-11 | A--FRPCA-YVCIE----ECEPCDAKTCP-IPVYREGYPIK-----GLCRACHLFG---------TT------ |
| | --------GYKGRVRFSFAKL---NGDAVW---------AK--GAG-GKD-YFTLPLLEKPRPT-----WTMP |
| | N--------------E--------------------GAKIPGRKFYVHHNEWKT |

Domains
.........................................................................................
........................
SECTION 13

| | |
|---|---|
| WmCas7x3 | QG---QVARLDNSGHVPSDGSGRPPW------QSRFDG--------QEDSGNK----RRVRVEPIPAGETFHF |
| | EIDFDNLSPTELEQLCATLLP-HPAFEHRLGMGKPIGLGSVKLAVEGL---LLVDRPRRYAEDEPNAPRHHRG |
| | W--RAN--ADAG--WPDHLQGDSPAAPLEAT-EQP-AALAERAMA--------- |
| SER16298.1 | QNG--NVMKLDAIGVNSGGSTCKPPWKTHKPAANDQKE--------FEEDKNKFITSRQVKIAPISENTPFYF |
| | EIDFNNLDATELAQLCATLQP-APKFEHRLGMGKPLGLGSVKEIPVGL---FLINRHQRYTTDSTNCDRYHYA |
| | W--LKG--EHAAWDWPEYFRQNVVTADCTQTFNDTFDKLVQNGLA--------- |
| GwCas7x3 | NE---QVVELSDTGH---DGGVRPPW------VSKFDE--------SADEGNK----RRVSIEPIAKDESFYF |
| | EVDFHNLSRTELAQLCATLYP-NEKFEHRLGMGKPLGLGSIKITPLSL---FLVNRSQRYATDGLDKPRYHAV |
| | W--HTG--TASEPRWPDHLQREQQGIAFEGVSTAP-TVMSLAAEA--------- |
| PID64649.1 | ENN-QNVQRITSQGKFDNAANRTQPW----------VS--------QNEERNH----LKTKCKPLKSGLNFFF |
| | HIDFNNLTQWELGLLCYALRP-CETFRHKIGMGKPIGLGTVKIDIAVL---QTIDRYARYTDTTQDSERYNQG |
| | A--WIS--QELQNEIPN--QYKGKGISNKKGMLSP-EDCRKVFME--------- |
| WP_031436019.1 | GDN--KVQKLGSQGETANGGDSKLPW---------VTH--------NPDERPQ----LKVKIKPIKAE--FIF |
| | SLDFNNLTEWELGLLCYALRP-TDSFRHRIGMGKPLGLGSVKIDIMAL---QTINRQQRYAQDGLEENRFNRH |
| | N--WVN--PPHQPRL----EKAGYSISLSSTPLNP-EILRATFTK--------- |
| HEB50754.1 | RGNPDRVQSLDRYGH-ATETAANPPW---------ETC--------HPEERPQ----IKVRVQPVRRKTKFFF |
| | HLDFSNLSRWELGLLCYVLRP-TACFRHKLGMGKPLGLGSVRIDIASL---QLIDRVRRYGTDDLTAGRYNMG |
| | G--HFN--ASCLDLLP---QQDSPAPDDSGAAPDP---QQDSPAPDDSGAAPDP-GTLRQDFVK--------- |
| HreCas7-11 | ----D--------GI-------------------------------DGETRTP----NNRTEIPLAEGNEFVF |
| | DIDFENLRDWELGLLLYSLEL-EDSLAHKLGLGKPLGFGTVQINIRGI---SLKN---------------GSK |
| | G--WDTKTGDDKNQWIK----KGF------------AHLGIDIKE--------- |
| CmaCas7-11 | ENI-K--------NNQGN------------------QKDISKLKPDSDAIKIKE----NNRTIEPLGKDNVFN |
| | FEISFNNLRDWELGLLLYAIEL-EDHLAHKLGMAKAFGMGSVKIEIKNL---LIKG----------------S |
| | IND--------ISKAELIK----KGF------------KKLGIDSLEKD------- |
| HvmCas7-11 | DKI-R--------NRQFD------------------PAK-EKQPD-DVIKPNE----NNRTVEPLGKGNEFTF |
| | EVRFNNLREWELGLLLYSLEL-EDNMAHKLGMGKALGMGSARIKAEAI---ELRC---------------ESA |
| | ---GQNAELKDKAAFVR----KGF------------EFLEIDKPGEN------ |
| SmCas7x3 | -VM-A--------GTNPI------------------TG--------ESIEKTA----NNATVEAIMPGATFTF |
| | DIVCENLDQQELGLLLYSLEL-EEGMSHTLGRGKPLGFGNVRIKVEKI---EKRL---------------SDG |
| | ---------SRREMIPP----KGA------------GLFMTDKVQDALRGLTEG |
| oral_meta | MWG-D--------DDKPD----------------------------SRPSSEE----CQDIIEGIGPGEKFHF |
| | RVAFENLDKNELGRLLYSLEL-DAGMNHHLGRGKAFGFGQVKIRVTKL---ERRL---------------EPG |
| | Q--SRS--EKICTDLPV----TSS------------ELVISSLKK--------- |
| DisCas7-11 | -IK-D--------GNHPT------------------TG--------KAIEQSP----NNRTVEALAGGNSFSF |
| | EIAFENLKEWELGLLIHSLQL-EKGLAHKLGMAKSMGFGSVEIDVESV---RLRK---------------DWK |
| | Q--WRN-GNSEIPNWLG----KGF------------AKLKEWFRD--------- |
| DsbaCas7-11 | -IS-E--------GIHPI------------------SG--------ENIEPDE----NNRTVEVLDKGNRFVF |
| | ELSFENLEPRELGLLIHSLQL-EKGLAHKLGMAKSMGFGSVEIDVESV---RVKH---------------RSG |
| | E--WDYKDGETVDGWIE----EGK------------RGVAAKGKA--------- |
| SstCas7-11 | -IN-C--------GCHPT------------------TK--------ENIVQNQ----NNRTVEPLDKGNTFSF |
| | EICFENLEPYELGLLLYTLEL-EKGLAHKLGMAKPMGFGSIDIEVENV---SLRT---------------DSG |
| | Q--WKD-ANEQISEWTD----KGK------------KDAGKWFKT--------- |
| CsbCas7-11 | -IR-Q--------KQLEI------------------RETVQPE----RNVTTEVMDKGNVFSFDVRFENLREW |
| | ELGLLLQSLDP-GKNIAHKLGKGKPYGFGSVKIKIDSLHTFKINS---------------NNDK--IKRVPQS |
| | DIREYIN----KGY------------QKLIEWSGNNSIQKGNVL |
| CjcCas7-11 | -VL-R--------NN-------------------------------DITPKTE----NNRTVEPLAADNRFTF |
| | DVYFENLREWELGLLCYCLEL-EPGMGHKLGMGKPMGFGSVKIAIERLQTFTVHQ---------------DGI |
| | N--WKP-SENEIGVYVQ----KGR------------EKLVEWFTPSAPHKNM-- |
| CbfCas7-11 | -VK-K--------NQ-------------------------------RTLVKTE----NNRTVKALDKENEFTF |
| | EVFFENLREWELGLLLHCLEL-EPEMGHKLGMGKPLGFGSVKIRIDKLQKCVVNV---------------KDG |
| | CVLWEP-EEDKIQHYIA----KGL------------GKLTTWFGK--------- |
| HvsCas7-11 | IIN-N--------SKK-------------------------------EKEKKTE----NNASFEVLKEG-EFT |
| | FKVYFENLENWELGLLLLSLT--GLGEAIKIGHAKPLGFGSVKIEAKKI---YFRE---------------EA |
| | GK--FHP--CEKADEYLK----GKL------------NKLTSWFGK--------- |
| HsmCas7-11 | IYK-K--------NKK-------------------------------NEIKKEK----NNATFEVLKQG-TFY |
| | FKVFFENLELWELGLLIFSAELGGEEFAHKLGHGKALGFGSVKISVDKI---ILRR---------------DP |
| | GQ--FEQRGQKFKRDAVD----KGF------------CVLENRFGK--------- |
| FmCas7-11 | IVD-E--------GKNPI------------------NG--------DVIEPDA----NNRTVEPLAAGNDFSF |
| | EVFFENLREWELGLLRY7TLEL-ESELAHKLGMGKAFGFGSVKIKIKSV---DLRK---------------QG |
| | E--------------WEK----ATN------------TLVSEDKKS--------- |
| DpbaCas7-11 | -VQ-E--------GKNPI------------------DQ--------KAIRPNP----NNSSVEVLNLGNEFQF |
| | EVSFENLEEWELGLLLYCLEL-EPGLAHKLGRGKAFGFGSIEAEVSKI---EMIR---------------KSG |
| | T--WKNE-TSGKEKFIQ----SGL------------SQVPSFFKQDEK------- |

Domains
.........................................................................................
........................
SECTION 14

| | |
|---|---|
| WmCas7x3 | ---RVPADVRRALQLLGNP----GAVAAPVHYPQVKDAQIE--EKH---YLWFVANDD--------------- |
| | -EKTAGGNRH---------------LPRL-----HANSPGLPTLPRLV-----KREKDHSSNTGKPRRK---- |
| | ------------------------------------------------------ |
| SER16298.1 | ---GTDADIKHALQLLGDP----QYIGVPVHYPIAGNSTLE--NKH---FEWFGNNDK----------ASVLR |
| | QKAQANSKNHHYQPKQQATPEEPQYLHTI-----TKDSKQISLLKKNKIEKIENRDQQKHRYSNHRR------ |
| | ------------------------------------------------------ |
| GwCas7x3 | ---KVSDDVKRALELLGNP----DEITVPVHYPQLHNGLME--SKQ---FDWFVQNDK-------------SG |
| | RDQPANNRQH---------------LSSF-----TKDTEKLEPLIRIM-----------------RR------ |
| | ------------------------------------------------------ |
| PID64649.1 | ---TMDADIQRAIELLGDP----GNVTSPVHYPQLDRKNIE--TKN---YEWFKQNEI--------------- |
| | ------EQQV---------------LKPI-----TKNTTHLTPFAR-------------------WEQG---- |
| | ------------------------------------------------------ |
| WP_031436019.1 | ---TMNADIYRTLELLGNP----QNVKRPVHYPQVENHNIE--QEN---YKWFVANDQ----------GSGKG |
| | RNKIDPAEKA---------------LKIL-----TRENSDCLPTLSRLD-----------------WRDE--- |
| | ------------------------------------------------------- |
| HEB50754.1 | ---TMDETVFRALDLLGNP----AHVQRPVHYPQVREMDIE--DQT---FLWFVDNDK--------------- |
| | -----QWKDA---------------LQPL-----TSSSTQLPPLTRRN-----------------KR------ |
| | ------------------------------------------------------ |
| HreCas7-11 | --ANERPYIKQLRELLWVP---TGDNLPHVRYPELESKTKD-----VPGYTSLLKE------------KDL-- |
| | -------ADR---------------VSLL-----KA---PWKPWKPWS-----GTAPHPDKGTNRLRASIVER |
| | DRIQRKTDTAKPEKKEETKVGKSSSSDIEKRYVGTVKWFNDKKGYGFI-LYGTD |
| CmaCas7-11 | -DLSEYLHIKQLREILWFS----DKPVGTIEYPKLENKTNS----RIPSYTDFVQEKDHETGFKNPKYQNL-- |
| | -------KSR---------------LHIL-----QN---PWNANWWKNE-----E------------------ |
| | --------------------------------------------------------- |
| HvmCas7-11 | -DPMNFDHIRQLRELLWFL---PENVSANVRYPMLEKEDDG-----TPGYTDFIKQEEPSTGKRNPSYLSS-- |
| | -------EKR---------------RNIL-----QT---PWKHWYLIP-----PFQASAQWETVFE------- |
| | ---------------------------------GTVKWFDDKKGFGFIKINDGG |
| SmCas7x3 | GDWHQRPHISGLRRLLTRY------PEIKARYPKLSQGEDK-----EPGYIELKSQKDENGVPI----YNP-- |
| | -------NRE---------------LRVS-----EN---GPLPWFLLA-----KK------------------ |
| | ------------------------------------------------------ |
| oral_meta | -----VEERRKLLRLVMTP-----TKGLTACYPGLERENGR------PGYTDLKML------------ATY-- |
| | -------DPY---------------RELVVQIGSNQ---PLRPWYEPG-----KSFKPSPGNDCTGRGGSVSK |
| | SLISEPKVV----------------PAIAPFCEGVVKWFNSVKGFGFI-ETKEQ |
| DisCas7-11 | ----ELDFIENLKKLLWFP---EGDQAPRVCYPMLRKKDDP--NGN-SGYEELKDGE-----------FKK-- |
| | -------EDR---------------QKKL-----TT---PWTPWA---------------------------- |
| | ------------------------------------------------------ |
| DsbaCas7-11 | ---------NDLRKLLYLP---GEKQNPHVHYPTLKKEKKG----DPPGYEDLKKSFR-----------EKK- |
| | --------LNR---------------RKML-----TT---LWEPWHK-------------------------- |
| | ------------------------------------------------------- |
| SstCas7-11 | -DWEAAEHIKNLKKLLFLP---GEEQNPRVIYPALKQKDIP--NSRLPGYEELKKN------------LNM-- |
| | -------EKR---------------EKML-----TT---PWAPWHPIK------------------------- |
| | ----------------------------------------------------- |
| CsbCas7-11 | PQWHVIPHIDKLYKLLWVPFLNDSKLEPDVRYPVLNEESKGYIEGSDYTYKKLGDKDN----------LPY-- |
| | -------KTR---------------VKGL-----TT---PWSPWNPFQ-----VIAEHEEQEVNVTGSRPSVT |
| | DKIERDGKMV-------------------------------------------- |
| CjcCas7-11 | -EWNGVHHIKDLRSLLSIP-----GDKPTVKYPTLNKDAEG--AISDYTYERLSDTKL----------LPH-- |
| | -------DKR---------------VEYL-----RT---PWSPWNAFV-----KEAEYSPSEKSDEKGRETIR |
| | TKPK---------------------SLPSVKSIGKVKWFDEGKGFGIL-IMDDG |
| CbfCas7-11 | -EWDRLEHIQGLRSLQRLL-------------PL--------------------------------------- |
| | ------------------------------------------------------------------------- |
| | -------------------------------------------------------- |
| HvsCas7-11 | --NEINEHMRNLLLFMTYY-----QNLPKVKYPDF------------DGYAKWRCS------------YVE-- |
| | -------QDK---------------VEYF-----QN---RWIVAS---------------------------- |
| | ------------------------------------------------------ |
| HsmCas7-11 | -TNFKI-YLNNFLQLLYWP----NNKKVKVRYPYLRQEDDP--EKL-PGYVELKKH------------QML-- |
| | -------KDD---------------NRYSLFARPRA---VWLKWTEMV-----QRDKS--------------- |
| | ------------------------------------------------------ |
| FmCas7-11 | -SWYNIHTVNNLRTALYYV----EDDKIQVNYPKLKKDNES---DNRPGYVEMKKTA-----------FPV-- |
| | -------RDI---------------L--------TT---PWWPWWPPT-----PPP,MQSGNQSYARSEEPAR |
| | ITE----------------------SQPEVYKTGTVKFYKHDKKFGFITMDGRE |
| DpbaCas7-11 | -QWNKVEQVKNIRKLLQLSWNKGNAVEPEVRYPALREKDDE--NKR-PGYVELKDNG-----------Y---- |
| | --------DA---------------GKKL-----VS---PWAPWHPIK-----K------------------- |
| | ------------------------------------------------------ |

Domains
.........................................................................................
........................
SECTION 15

| | |
|---|---|
| WmCas7x3 | --------------------------------------------- |
| SER16298.1 | --------------------------------------------- |
| GwCas7x3 | --------------------------------------------- |
| PID64649.1 | --------------------------------------------- |
| WP_-31436019.1 | --------------------------------------------- |
| HEB50754.1 | --------------------------------------------- |
| HreCas7-11 | EEIFVHRSGVADNSIPKEGQVGFRIERGARGSHAVEVKAIE--- |
| CmaCas7-11 | --------------------------------------------- |
| HvmCas7-11 | KDVFVHHSSIVGTGFKSLNEGDSVAFKMGVGPKGPCAEKVKKIGN |
| SmCas7x3 | --------------------------------------------- |
| oral_meta | RDIFVHFSAIRGEGYKILEPGEKVRFEIGEGRKGPQAINGIRIR- |
| DisCas7-11 | --------------------------------------------- |
| DsbaCas7-11 | --------------------------------------------- |
| SstCas7-11 | --------------------------------------------- |
| CsbCas7-11 | --------------------------------------------- |
| CjcCas7-11 | KEVSISKNSIRGNILLKKGQKVTFHIVQGLIPKAEDIEIAK---- |
| CbfCas7-11 | --------------------------------------------- |
| HvsCas7-11 | --------------------------------------------- |
| HsmCas7-11 | --------------------------------------------- |
| FmCas7-11 | NIHFAGNQICRPET--SLQSGDKVKFIEGENYKGPTALKVERLKG |
| DbbaCas7-11 | --------------------------------------------- |
| Domains | .............................. |

### EXAMPLES

[0324] While several experimental Examples are contemplated, these Examples are intended non-limiting.

### Example 1

### Cas7-11 Family

[0325] New Cas7-11 family members were mined from bacterial and metagenomic data downloaded from NCBI, JGI, and ENA repositories. CDS were extracted using MetaGeneMark (Besemer and Borodovsky 1999; Zhu et al. 2010), and used to build BLAST databases (Camacho et al. 2009). Existing Cas7-11 family members (Makarova et al. 2019) were used as seeds to find putative orthologs. In parallel CRISPR arrays were identified using both CRISPRCasFinder (Couvin et al. 2018) and PILER-CR (Edgar 2007), and putative orthologs were filtered for proximity to CRISPR arrays.

[0326] Cas7-11 family members were computationally identified and expressed. The Cas7-11 family is summarized in the trees presented in FIG. 2A. The type III-E Cas7-11 locus from Desulfonema ishimotonii (DisCas7-11) comprises multiple Cas7-like gRAMP domains, including a small subunit domain and an unknown insertion in the Csm3-like domain 5 (FIG. 2B). The CRISPR array was expressed in Desulfonema ishimotonii and processed into mature crRNAs containing 14-nt direct repeats (DRs) and ˜31 nt spacers (FIG. 2C). The cleavage site for processing and maturation is illustrated in FIG. 2D.

[0327] By screening a database of bacterial genomic and metagenomic sequences from diverse sources containing more than ˜11.6 billion protein sequences, the set of subtype III-E systems was expended to 17 loci from various bacteria and metagenomes (FIG. 2A). Apart from the identification of many additional type III-E loci, a novel subset of III-D systems (subtype III-D2) that was characterized by an the fusion of 3 Cas7 domains into a single protein, referred to as Cas7×3 was identified (FIG. 2A and FIG. 2B and Table 1). This similarity of the domain architectures, together with the phylogenetic analysis of the Cas7 domain (FIG. 2A), suggests an evolutionary path from subtype III D1 to III-D2 via the fusion of 3 Cas7 proteins, and then, from III-D2 to III-E via the fusion with an additional Cas7 protein and the Cas11 protein.

[0328] Examination of the extended set of type III-E systems confirmed that almost all III-E loci (15 of the 17) contained the TPR-CHAT protein (Csx29), and a majority encompassed uncharacterized proteins denoted Csx30 (10/17) and Csx31 (9/17) as well as the alternative sigma factor RpoE (8/17) (FIG. 1E). The frequent presence of these genes in the III-E loci suggests that the respective proteins play accessory roles in the CRISPR response. More than half of the III-E loci (9/17) also contain the adaptation gene Cas1 which, in 8 of these 9 loci, is fused to a reverse transcriptase (RT), in a common arrangement among the type III systems, as well as a CRISPR array (12/17). Searching the spacer sequences against the NCBI NT (nucleotide sequences) database did not identify any matches, in agreement with the previous observations that the majority of the CRISPR spacerome consists of “dark matter” that apparently reflects vast, still unexplored viromes. Furthermore, alignments of the Cas7 domains of the Cas7×3 and Cas7-11 proteins show conservation of acidic residues implicated in crRNA guided target cleavage (FIGS. 1F-1K). The activities of Cas7-11 and Cas7×3 proteins were experimentally characterized to assess the path of evolution that resulted in the unique Class 1 single protein effector that is predicted to function as a programmable RNase without collateral activity.

### Example 2

### Cas7-11 Defense

[0329] The RNA-guided RNA-targeting Cas7-11 was demonstrated to be capable of defense against ssRNA MS2 phage and RNA knockdown in bacteria.

[0330] The CRISPR array screen of all crRNAs targeting the MS2 genome was performed (FIG. 3A). The results of the MS2 interference screen is shown in FIG. 3B (for MS2 targeting spacers) and FIG. 3C (for non-targeting spacers). Regarding FIG. 3B, the results of the MS2 interference screen are shown as box plots. Enrichment of DisCas7-11 spacers in the phage targeting condition denote survival of bacteria and enhanced representation of specific active spacers. Boxes denotes 25th and 75th percentiles with the median marked by the middle line. The whiskers are calculated via the Tukey method (1.5 times the inter-quartile range). Outliers are denoted by blue plus symbols. FIG. 3C shows the results of the MS2 interference screen showing enrichment of DisCas7-11a non-targeting spacers across varying phage dilution amounts as box plots. Boxes denotes 25th and 75th percentiles with the median marked by the middle line. The whiskers are calculated via the Tukey method (1.5 times the inter-quartile range). Outliers are denoted by blue plus symbols.

[0331] The enrichment of DisCas7-11 crRNAs in the phage targeting condition denotes the survival of bacteria and enhanced representation of specific active crRNAs. The results of the MS plaque dilution assay are shown in FIG. 3D. The assay shows significant survival of E. coli containing the top crRNA identified in the MS2 screen. In the non-targeting spacer, dilutions of phage up to 1e9 are capable of lysing bacteria. For the top targeting spacer, only dilutions up to 1e4 are capable of lysis because of DisCas7-11 interference.

[0332] The number of DisCas7-11a spacers that display survival enrichment over a threshold of 1.7 across different phage dilution conditions are shown in FIG. 3E. The quantification of resistance conferred by top MS2-targeting DisCas7-11 spacers compared against a panel of 4 non-targeting spacers is shown in FIG. 3F. The resistance is quantified as the highest surviving titer of MS2 phage that generates plaques in the dilution assay.

[0333] The quantification of resistance conferred by two MS2-targeting DisCas7-11 spacers compared against a panel of 6 non-targeting spacers is shown in FIG. 3G. Resistance is quantified as the final dilution of MS2 phage that generates plaques in the dilution assay.

[0334] The RFP knockdown assay containing a DisCas7-11 and spacers expression vector co-transformed with an RFP-expressing vector is illustrated in FIG. 3H, and the results from the knockdown assay are shown in FIG. 3I. The RFP knockdown assay by multiple targeting spacers is normalized to a non-targeting condition as determined by flow cytometry. DisCas7-11-mediate RFP knockdown was found to exceed 50%.

[0335] The DisCas7-11a full locus with TPR-CHAT nearby and DisCas7-11a effector expressed alone with TPR-CHAT are illustrated in FIG. 3H, and the MS2 interference activity of DisCas7-11a in the full locus and as a single effector with and without TPR-CHAT expression is shown in FIG. 3I.

### Example 3

### Cas7-11 Cleavage Activity

[0336] The DisCas7-11 programmable RNA cleavage activity was biochemically characterized. The CRISPR array processing assay for DisCas7-11 is illustrated in FIG. 4A and shows robust processing activity by DisCas7-11. The DisCas7-11 was assayed at concentrations ranging between 0 nM and 233 nM. The in vitori cleavage of ssRNA 1 target is illustrated in FIG. 4B and demonstrates that programmable DisCas7-11 RNA targeting is Mg+2 and crRNA dependent. Note that the targets are either 5′ or 3′ fluorescently labeled. The results from the cleavage of EGFP ssRNA at multiple sites with tiled crRNAs are shown in FIG. 4C. A varying cleavage pattern based on target position is observed. The protospacer flanking site (PFS) sequence screen is illustrated in FIG. 4D and shows a varying cleavage pattern based on target position and a lack of sequence preference flanking the target site for DisCas7-11 cleavage. The kinetics of fluorescence due to RnaseAlert collateral cleavage by DisCas7-11 or LwaCas13a targeting and non-targeting crRNA against the MS2 RNA target are illustrated in FIG. 4E. The processing activity of a synthetic DisCas7-11 CRISPR array by DisCas7-11 protein with predicted catalytic processing mutants in the protein insert region with a characteristic K×Y×H catalytic triad motif is illustrated in FIG. 4F. The measurement of bacterial growth (0D600) during target interference by DisCas7-11 and LwaCas13 is shown in FIG. 4G.

### Example 4

### Cas7-11 Catalytic Residues

[0337] The catalytic residues in DisCas7-11 were identified.

[0338] The protein domains of DisCas7-11 with putative catalytic residues highlighted in Cas7-like domains 3 and 4 are illustrated in FIG. 5A. The results from the cleavage of synthetic ssRNA target with two cRNAs and wild type, D429A, D654A, and D429A/D654A DisCas7-11 proteins are shown in FIG. 5B. The cleavage is affected by the single mutants and completely inactivated by the double mutant D429A/D654A. The processing of a synthetic DisCas7-11 CRISPR array by catalytic DisCas7-11 mutants is not affected by D429A and D654A catalytic mutations (FIG. 5C). The MS2 phage interference in bacteria is affected by D429A/D654A mutations, although there is remaining residual interference above the lack of DisCas7-11 altogether (FIG. 5D). The RFP knockdown in E. coli is prevented by the catalytic mutation D429A/D654A in DisCas7-11 (FIG. 5E).

[0339] The DisCas7-11:crRNA complex binding to a complementary MS2 ssRNA target is determined by electrophoretic mobility shift assay (EMSA) and illustrated in FIG. 5F. An EMSA is performed for both the WT DisCas7-11 and dead DisCas7-11 complexes and is compared to WT DisCas7-11 in complex with a non-targeting crRNA. The Kd value for the WT and dead DisCas7-11 complexes are shown below corresponding gels.

### Example 5

### Cas7-11 Cleavage Sites

[0340] DisCas7-11 cleavage sites were characterized. The DisCas7-11 guides targeting multiple sites on a synthetic 100 nt EGFP ssRNA target are illustrated in FIG. 6A and the cleavage patterns of each EGFP-targeting guide incubated with DisCas7-11 on a 3′ labeled EGFP ssRNA are shown in FIG. 6B. The DisCas7-11 guides targeting of multiple sites on either MS2 ssRNA or ssRNA target 2, two targets of equivalent length (153 nt), are illustrated in in FIG. 6C. The guides are designed to target sites at the same position on both targets in order to better understand whether sequence specific cleavage preferences exist and whether cleavage cut sites are position dependent. The cleavage patterns of each guide incubated with MS2 ssRNA or ssRNA target 2 are shown in FIG. 6D.

### Example 6

### Cas7-11 Orthologs Activity

[0341] The CRISPR processing and RNA cleavage activity were demonstrated for different DisCas7-11 orthologs.

[0342] The schematics of three Cas7-11 orthologs (GwCas7-11, CjcCas7-11, and DisCas7-11) chosen for additional characterization are shown in FIG. 7A, wherein a multiple sequence alignment of the three orthologs compared against the domain organization of a typical Cas7-11 protein is shown. The multiple sequence alignments of the DR sequences for GwCas7-11, CjcCas7-11, and DisCas7-11 are shown in FIG. 7B. Mismatches against the consensus are highlighted in red and the grey region shows the sections of the DRs that are cleaved from the pre-crRNAs to generate mature crRNAs.

[0343] The activity of the GwCas7-11 orthologs at concentrations between 2 uM to 125 nM was assessed. The activity of Cas7-11 from Candidatus Jettenia caeni (CjcCas7-11) shows robust processing of CRISPR arrays specific to the CjcCas7-11 locus (FIG. 7C). The activity of Cas7-11 from ground water metagenomes (GwCas7-11) shows robust processing of CRISPR arrays specific to the GwCas7-11 locus (FIG. 7D). MS2 ssRNA target cleavage by GwCas7-11 and CjcCas7-11 incubated with their cognate crRNAs using guides complementary to the MS2 ssRNA target is illustrated in FIG. 7E. The incubation of GwCas7×3 and CjcCas7-11 proteins with their cognate crRNAs complementary to the MS2 ssRNA target at varying positions along the target is illustrated in FIG. 7F.

### Example 7

### Cas7-11 RNA Knockdown in Mammalian Cells

[0344] The knockdown of RNA in mammalian cells by DisCas7-11 was evaluated. The schematic of a luciferase reporter assay for RNA knockdown using a vector expressing human codon-optimized DisCas7-11 and guide RNA is shown in FIG. 8A. The knockdown activity of DisCas7-11 against the Gaussia luciferase (Gluc) transcript normalized to two non-targeting conditions is illustrated in FIG. 8B. Note that the dotted line in this figure represents 85% knockdown. The knockdown activity of DisCas7-11 against the multiple endogenous transcripts normalized to two non-targeting conditions is illustrated in FIG. 8C. Note that the dotted lines in this figure represent background expression and 65% knockdown by DisCas7-11.

[0345] RNA A-to-I editing of Cypridina luciferase (Cluc) mRNA W85X mutation in mammalian cells by dead DisCas7-11a-NES-ADAR2 was investigated. Guides were designed with mismatch distances between 2-50 nt. Editing was measured by two methods: 1) restoration of Cluc luciferase activity that is normalized to the non-targeting guide condition (FIG. 8E) and 2) amplicon sequencing of the targeted adenosine to measure percent conversion of the adenosine to inosine (FIG. 8F).

[0346] The RFP knockdown by DisCas7-11 or LwaCas13a in E. coli bacteria was assessed (FIG. 8G). The knockdown of Gluc mRNA in mammalian cells by DisCas7-11 with a panel of guides containing the mature DR sequence was assessed (FIG. 8H). The guides were designed to be tiled across the Gluc transcript. The knockdown of Gluc mRNA in mammalian cells by DisCas7-11 with a panel of guides of different lengths was assessed (FIG. 8I). Comparison of the number of significant off-targets when targeting the Gluc transcript in HEK293FT and U87 cells by DisCas7-11, shRNA, LwaCas13a, PspCas13b, and RfxCas13d using transcriptome-wide RNA-sequencing data is shown in FIG. 8G. Off-targets were determined by significance testing of differentially expressed transcripts between targeting and non-targeting guide conditions. Comparison of the number of significant off-targets when targeting the Gluc transcript in HEK293FT and U87 cells by DisCas7-11, shRNA, LwaCas13a, PspCas13b, and RfxCas13d using transcriptome-wide RNA1217 sequencing data is shown in FIG. 8K. Off-targets were determined by significance testing of differentially expressed transcripts between the targeting guide condition and cells only expressing EGFP. The data were mean (n=3)±s.e.m.

[0347] Given that DisCas7-11 lacked collateral activity in vitro or in vivo, the efficiency and effects of targeting with DisCas7-11, multiple Cas13 family members, and RNA interference through small hairpin RNA (shRNA) was compared. The activity in HEK293FT cells was assessed, for which no detectable growth impact from Cas13a targeting has been reported. Comparing Gluc knockdown between DisCas7-11, LwaCas13a, PspCas13b, RfxCas13d, and shRNA, comparable knockdown efficiencies was found for the different systems, with the exception of LwaCas13a, which could only reach ˜35% knockdown (FIG. 8L). By assessing the specificities of the different systems by whole transcriptome profiling in HEK293FT cells and comparing between targeting and non-targeting guide conditions, it was found that there were more differentially expressed genes for shRNA and RfxCas13d than for DisCas7-11 (FIG. 8M). LwaCas13a and PspCas13b had minimal off-target effects on the transcriptome when comparing targeting versus non-targeting guide conditions, and none of these knockdown tools had any effect on HEK293FT cell viability (FIGS. 8M-8N). In addition, when comparing targeting conditions of the different tools to a no-protein, GFP condition, only RfxCas13d expression was found to result in detectable differential gene expression. Because cell toxicity of Cas13 has been reported in certain cell types, such as the U87 glioblastoma cell line7, the degree of toxicity due to the collateral activity of Cas13 may be cell-type specific. Thus, the comparison of shRNA, Cas13a/b/d, and Cas7-11 knockdown activities was repeated in U87 cells, finding efficient knockdown by DisCas7-11, PspCas13b, and RfxCas13d, less efficient knockdown with LwaCas13a, and no activity from shRNA (FIG. 8O). Whereas DisCas7-11 and the Cas13 variants showed minimal differential gene expression off-targets when comparing between targeting and non-targeting conditions, evaluation of targeting conditions versus the no protein, GFP-only control showed increased numbers of differentially expressed genes in RfxCas13d, LwaCas13a, and PspCas13b compared to DisCas7-11 (FIG. 8P). Moreover, Cas13 enzymes and shRNA caused cell toxicity resulting in ˜30-50% cell death, whereas DisCas7-11 expression had minimal impact on cell viability (FIG. 8Q), consistent with the specific knockdown demonstrated by transcriptome sequencing. The observation that certain cell lines can be more susceptible to non-specific RNA degradation than others is consistent with other reports on substantial RNAi toxicity in diverse cell lines. Moreover, the ineffectiveness of the RNAi constructs in U87 cells herein, in contrast to their functionality in HEK293FT cells, is consistent with the low Dicer and Argonaute 2 expression in U87 cells, causing poor on-target knockdown, with off-target induced toxicity. The highly specific and low toxicity knockdown activity of DisCas7-11 compared to other RNA knockdown tools, RNAi and Cas13, could make Cas7-11 proteins more generally applicable and appropriate tools for RNA knockdown across diverse cells and tissues.

### Example 8

### Heterologous Expressions of Type-III-E CRISPR Cas System

[0348] The heterologous expression of the Desulfonema ishimotonii Type III-E CRISPR-Cas system and associated CRISPR array were performed. The Desulfonema ishimotonii Type III-E full locus matures crRNAs (FIG. 9A), single effector protein DisCas7-11 matures crRNAs in E. coli. (FIG. 9B) and DisCas7-11 CRISPR array without any effector or accessory proteins (FIG. 9C) were expressed. Additional type III-E family members and loci architecture are illustrated in FIG. 9D.

### Example 9

### Cas7-11 Dilution Assays

[0349] Dilution assays with DisCas7-11 and different spacers were performed. The DisCas7-11 assays for MS2 targeting spacers, non-targeting spacers and RFP targeting spacers were performed with dilution of phage up to 1e-1 (FIG. 10). The assay shows that bacteria with DisCas7-11a and MS2 targeting guides can survive at higher viral loads

### Example 10

### Effects Genes on MS2 Interference

[0350] The effects of genes in the Desulfonema ishimotonii type III-E CRISPR-Cas locus on MS2 interference were analyzed. The Type III-E locus of the Desulfonema ishimotonii is illustrated in FIG. 11A. Results of the phage plaque assay of the incomplete Type III-E DisCas7-11 CRISPR-Cas locus are shown in FIG. 11B. The knock-out of TPR-CHAT shows the highest positive effect on the interference by DisCas7-11. Results from the phage plaque assay of the individual gene knock-in together with of the Type III-E DisCas7-11 CRISPR-Cas system are shown in FIG. 11C. Knock-in data shows that RpoE has an inhibitory effect on DisCas7-11.

### Example 11

### Cas7-11 Pre-crRNA Processing to DR Mutations

[0351] The robustness of DisCas7-11 pre-crRNA processing to DR mutations was evaluated. The in vitro transcription of pre-crRNA and processing by DisCas7-11 is illustrated in FIG. 12A. The sequence of a single spacer CRISPR array showing locations of mutated bases is shown in FIG. 12B. The transcribed pre-crRNA was processed and the results showed the effect of consecutive double mutations on processing (FIG. 12C). Transcribed pre-crRNA was processed and the results showed the effect of consecutive double mutations on processing (FIG. 12D).

### Example 12

### Effect of Ion on Cas7-11 Activity

[0352] The effects of ions on pre-crRNA processing and ions, complex concentrations, and incubation time on target cleavage was analyzed. The in vitro transcription and 5′ end labeling of pre-crRNA and processing by DisCas7-11 were assessed. Pre-crRNA was processed by DisCas7-11 in the presence of different ions or chelating agents (FIG. 13A). CRISPR array processing by DisCas7-11 is shown to be ion independent. A schematic of in vitro cleavage of ssRNA target with DisCas7-11 and crRNA 5 is shown in FIG. 13B. The ssRNA target was incubated with DisCas7-11 and targeting or non-targeting crRNA in the presence of different ions or chelating agents (FIG. 13C). The results show the dependence on magnesium, manganese, and calcium. The cleavage of ssRNA target with increasing amounts of DisCas7-11-crRNA complex from 0 nM to 233 nM was performed (FIG. 13D). The cleavage of ssRNA target at increasing incubation periods from 0 minutes to 180 minutes was also performed (FIG. 13E).

### Example 13

### Effect of DR Length, Spacer Length and DR Mutations on Cas7-11 Activity

[0353] The effects of DR length, spacer length, and DR mutations on in vitro target cleavage by DisCas7-11 were evaluated. A schematic of the sequence of DisCas7-11 crRNA 5 targeting the ssRNA target is shown in FIG. 14A. The ssRNA target was cleaved with crRNA of varying DR and spacer lengths (FIG. 14B). A schematic of the sequence of DisCas7-11 crRNA 1 targeting the MS2 target is shown in FIG. 14C. The MS2 ssRNA target was cleaved (FIG. 14D). The results show the effect of single and double mutations at various positions in the DR, and several single and double mutations cause inhibition of DisCas7-11 target cleavage.

### Example 14

### DisCas7-11 In Vivo Collateral Activity

[0354] The in vivo collateral activity of DisCas7-11 was evaluated. The results from the three-hour end point fluorescence of RnaseAlert reporter incubated with either DisCas7-11 or LwaCas13a targeting and non-targeting guides against MS2 ssRNA target are shown in FIG. 15. The LwaCas13a demonstrates robust collateral activity whereas DisCas7-11 has no collateral cleavage of the RNase alert reporter.

### Example 15

### Activity of DisCas7-11 Catalytic Mutants

[0355] The cleavage activity of DisCas7-11 catalytic mutants on MS2 RNA target was evaluated. A schematic showing the positions of DisCas7-11 crRNA 1 and crRNA 2 targeting the MS2 target is shown in FIG. 16A. The cleavage of a synthetic MS2 ssRNA target with two cRNAs and wild type, D429A, D654A, and D429A/D654A DisCas7-11 proteins was performed (FIG. 16B). The D429A/D654A mutant demonstrates reduced cleavage activity on the target.

[0356] The DisCas7-11 catalytic mutants that were assessed are presented in Table 16 below.

TABLE 16

| Mutation | In vitro status | Domain |
|---|---|---|
| E70 | Purified, no effect | 1 |
| D77 | Purified, no effect | 1 |
| E93 | Purified, no effect | 1 |
| D111 | Purified, no effect | 1 |
| D143 | Purified, no effect | 1 |
| D160 | Purified, no effect | 1 |
| D162 | Purified, no effect | 1 |
| D177 | Purified, cut inactivated, bottom | 1 |
| D185 | Purified, no effect | 1 |
| D193 | Purified, no effect | 1 |
| D226 | Purified, no effect | 1 |
| D238 | Purified, no effect | 1 |
| E280 | Purified, no effect | 2 |
| D287 | Purified, no effect | 2 |
| W315 | Purified, no effect | 2 |
| D316 | Purified, no effect | 2 |
| D379 | Purified, no effect | 2 |
| E381 | Purified, no effect | 2 |
| E390 | Purified, no effect | 2 |
| D422 | Purified, no effect | 3 |
| D429 | Purified, cut inactivated, | 3 |
| | middle (top shifts up) | |
| D437 | Purified, no effect | 3 |
| D454 | Purified, no effect | 3 |
| D487 | Purified, no effect | 3 |
| E497 | Purified, no effect | 3 |
| E520 | Purified, no effect | 3 |
| D543 | Purified, no effect | 3 |
| D581 | Purified, no effect | 3 |
| D642 | Purified, no effect | 4 |
| D654 | Purified, cut inactivated, bottom | 4 |
| D727 | Purified, no effect | 4 |
| D733 | Purified, no effect | 4 |
| D740 | Purified, no effect | 4 |
| D745 | Purified, cut inactivated, bottom | 4 |
| D753 | Purified, no effect | 4 |
| D758 | Purified, cut inactivated, bottom | 4 |
| D781 | Purified, no effect | 4 |
| D798 | Purified, no effect | 4 |
| D825 | Purified, no effect | 4 |
| D909 | Purified, no effect | 5 |
| D914 | Purified, no effect | 5 |
| E959 | Purified, cut inactivated, bottom | 5 |
| D970 | Purified, no effect | 5 |
| D982 | Purified, no effect | 5 |
| D998 | Purified, cut inactivated, bottom | 5 |
| D1015 | Purified, no effect | 5 |
| D1025 | Purified, no effect | 5 |
| D1118 | Purified, no effect | 5 |
| D1179 | Purified, no effect | 5 |
| D1273 | Purified, no effect | 5 |
| D1297 | Purified, no effect | 5 |
| D1308 | Purified, no effect | 5 |
| D1367 | Purified, no effect | 5 |
| D1404 | Purified, no effect | 5 |
| D1539 | Purified, no effect | 5 |
| D1569 | Purified, no effect | 5 |
| D1588 | Purified, no effect | 5 |

### Example 16

### Cas7-11 EMSA Binding Assays

[0357] Electrophoretic mobility shift assays (EMSA) for crRNA-target interactions and quantification of EMSA intensities were performed (FIGS. 17A-F). The EMSA assays for targeting crRNA in the absence of DisCas7-11 show minimal binding of the cRNA and shift of the labeled target). Target binding was found to be crRNA-dependent, as expected, and the dead mutant to have a similar affinity to ssRNA as the active DisCas7-11 protein. Furthermore, agreeing with the lack of ssDNA cleavage, DisCas7-11 showed weak ssDNA binding, and efficient binding required the full protein complexed with a.

### Example 17

### DisCas7-11 Cleavage Sites on ssRNA Targets

[0358] The characterization of DisCas7-11 cleavage sites on ssRNA targets was performed.

[0359] DisCas7-11 was incubated with a panel of crRNAs targeting either MS2 ssRNA or ssRNA target 2, two targets of equivalent length (153 nt) (FIG. 18A). The crRNAs are designed to target sites at the same position on both targets in order to better understand whether sequence-specific cleavage preferences exist and whether cleavage cut sites are position dependent. The cleavage of ssRNA 1 and MS2 ssRNA at multiple sites with tiled crRNAs were also performed (FIG. 18B). A varying cleavage pattern based on target position was observed.

[0360] A schematic of the position of the tested crRNAs along the SARS-CoV-2 ssRNA is shown in FIG. 18C. The results from the cleavage of synthetic SARS-CoV-2 ssRNA at multiple sites with tiled crRNAs showing a varying cleavage pattern based on target position are also shown in the same figure. A schematic of the position of the tested crRNAs along the Influenza A ssRNA target is shown in FIG. 18D. The results from the cleavage of synthetic influenza A segment 4 HA gene ssRNA at multiple sites with tiled crRNAs showing a varying cleavage pattern based on target position are also shown in the same figure.

[0361] DisCas7-11a was incubated with a crRNA targeting a crRNA site flanked by different sequences (FIG. 18E). While the spacer:target complementarity region is fixed, the sequences around the site are completely variable, allowing determination of any sequence preferences for cleavage. DisCas7-11a was also incubated with a crRNA targeting a double-stranded (dsDNA) target with 5′ labeling of the bottom strand (FIG. 18F) or top strand (FIG. 18G).

### Example 18

### Cleavage Activity on Various Length EGFP ssRNA Substrates

[0362] Biochemical characterization of DisCas7-11 programmable RNA cleavage activity on various length EGFP ssRNA substrates was performed. A schematic of the position of the tested crRNAs along the 100 nt EGFP ssRNA target is shown in FIG. 19A. The biochemical characterization of programmable DisCas7-11 RNA cleavage of 100 nt long and 3′ fluorescently labeled EGFP ssRNA target with tiling crRNAs is also shown in this figure. A schematic of the position of the tested crRNAs along the 200 nt EGFP ssRNA target is shown in FIG. 19B. The biochemical characterization of the programmable DisCas7-11 RNA cleavage of 200 nt long and 3′ fluorescently labeled EGFP ssRNA target with tiling crRNAs is also shown in this figure. A schematic of the position of the tested crRNAs along the 600 nt EGFP ssRNA target is shown in FIG. 19C. The biochemical characterization of the programmable DisCas7-11 RNA cleavage of 600 nt long and 3′ fluorescently labeled EGFP ssRNA target with tiling crRNAs is also shown in this figure. The DNA sequencing analysis of selected EGFP targeting crRNA conditions on an unlabeled 400 nt EGFP ssRNA target was performed (FIG. 19D). The DisCas7-11a cleavage was found to occur at both sides directly flanking the crRNA binding site, with cleavage occurring approximately 20 bases downstream of the 5′ position of the spacer. Other biochemical characterizations of DisCas7-11 programmable RNA cleavage activity are shown in FIGS. 19E-19G

### Example 19

### Candidatus Jettenia caeni Type III-E CRISPR-Cas System

[0363] The heterologous expression of the Candidatus Jettenia caeni Type III-E CRISPR-Cas system and associated CRISPR array in E. coli was performed. The schematic of Candidatus Jettenia caeni locus (minus Cas1) in E. coli is shown in FIG. 20. The processing of crRNAs occurs when the CjcCas7-11 locus is heterologously expressed in E. coli, and mature 37 nt crRNAs are generated containing a 15-nt DR.

### Example 20

### Processing of Cas7-11 Orthologs

[0364] The processing of Cas7-11 orthologs was found to be specific to the cognate pre-cRNAs and to do not occur on other synthetic RNAs. The DisCas7-11 pre-cRNA processing is specific to the DisCas7-11 array and does not occur on the MS2 ssRNA target as illustrated in FIG. 21A. The GwCas7-11 pre-cRNA processing is specific to the GwCas7-11 array and does not occur on the MS2 ssRNA target as illustrated in FIG. 21B. The CjcCas7-11 pre-cRNA processing is specific to the CjcCas7-11 array and does not occur on the MS2 ssRNA target as illustrated in FIG. 21C. FIG. 21D shows the comparison of target cleavage between active CjcCas7-11 and dead CjcCas7-11.

### Example 21

### Cas7-11 Correction of Cluc W85X

[0365] The correction of Cluc W85X mRNA by dDisCas7-11 was measured. A schematic of the DisCas7-11 guide design for RNA editing of Cluc W85A target mRNA is shown in FIG. 22A. A table disclosing the different guides used for the correction of the mRNA is shown in FIG. 22B. The dDisCas7-11 correction of Cluc W85X RNA by the different guides is shown in FIG. 22C, and the percentage editing for the correction is shown in FIG. 22D. The luciferase correction that correlates to the correction percent is shown in FIG. 22E.

### Example 22

### Harvesting and Next-Generation Sequencing of crRNA and Pre-crRNA from Desulfonema ishimotonii and E. coli

[0366] To extract total RNA, freeze-dried Desulfonema ishimotonii cultures (DSMZ 9680) were resuspended in TRIzol (R2051, Zymo), homogenized by bead beating with zirconia/silica beads, and processed with the Direct-Zol RNA miniprep protocol (R2051, Zymo). Purified RNA samples were treated with T4 Polynucleotide Kinase (M0201S, New England Biolabs), both with and without ATP to allow for the enrichment of 3′-P and 5′-OH ends. Samples has ribosomal RNA depleted using the Ribo Minus Kit (K155004, Thermo Fisher Scientific) before being processed for next-generation sequencing with the NEBNext Small RNA Library Prep Set for Illumina sequencing (E7330S, New England Biolabs). Notably, the PCR extension step was increased to 1 minute to allow for longer templates to be included in the library. Libraries were sequenced on an MiSeq (Illumina) to sufficient depth and analyzed using the alignment tool BWA (Li and Durbin 2009). Paired-end alignments were used to extract entire transcript sequences using Galaxy tools (https://usegalaxy.org/), and these sequences were analyzed using Geneious 8.1.5 (Biomatters, Auckland, New Zealand) and custom scripts (https://github.com/abugoot-lab).

### Example 23

### Design and Cloning of Bacterial Constructs

[0367] To clone DisCas7-11 constructs, genomic DNA from D. ishimotonii cultures (DSMZ 9680) was extracted using the Blood & Cell Culture DNA Mini Kit (13323, Qiagen). The Type III-E D. ishimotonii CRISPR locus was PCR amplified and cloned into a pACYC184 backbone with chloramphenicol resistance using Gibson cloning. For the Cas7-11 only construct, DisCas7-11a was cloned with a J23119 promoter and B0015 terminator. Removal or addition of other genes in the CRISPR locus was cloned using Gibson cloning; when adding genes to the Cas7-11-only construct, expression of these genes was driven by a pLac promoter. In order to facilitate simple cloning of spacers, a minimal spacer construct with two flanking direct repeats (DR) surrounding a Golden Gate acceptor site was used as a backbone for Golden Gate cloning (Engler and Marillonnet 2014). To clone the CjcCas7-11b locus, DNA corresponding to the locus was synthesized by GeneArt (Thermo Scientific). Unless otherwise noted, all clonings were transformed into Stbl3 cells (C737303, Thermo Fisher Scientific) made competent with the Mix and Go kit (T3001, Zymo Research), all colonies were picked into Terrific Broth (TB) (24 g/L Yeast Extract, 12 g/L Tryptone, 9.4 g/L K2HPO4, 2.2 g/L KH2PO4, pH 7.2) supplemented with the appropriate antibiotic (chloramphenicol, 25 μg/mL; ampicillin, 100 μg/mL) and all plasmids were isolated using the QiaPrep Spin Miniprep kit (27104, Qiagen) protocol and verified by next generation sequencing on a MiSeq (Illumina). All bacterial plasmids used are listed in Table 3.

### Example 24

### Cloning of Screening Libraries for MS2 Interference Activity Screen

[0368] To design the MS2 library for screening, all possible spacers targeting the MS2 genome were computationally extracted, and synthesized as a library by Twist Biosciences. This library was Golden Gate cloned into the minimal CRISPR array containing the Golden Gate acceptor site on the DisCas7-11a-only backbone and transformed into Endura Duo electro-competent cells (60240-1, Lucigen) and plated on chloramphenicol-supplemented Bioassay agar plates. 16 hours post transformation, libraries were harvested by scraping and purified using a NucleoBond Xtra MaxiPrep EF (740424.10, Takara Bio).

### Example 25

### Bacterial Phage Interference PFS Screen Assay

[0369] To transform the MS2 spacer library, 400 uL NovaBlue(DE3) Gigasingle competent cells (71227-3, EMD Millipore) were transformed with a total of 2 ug of the spacer library. Cells were recovered in SOC while shaking at 37° C. for 1 hour. After recovery, cells were split into two biological replicates and used to inoculate 8 mL of Luria Broth (LB) (10 g/L tryptone, 5 g/L yeast extract, 5 g/L NaCl) supplemented with chloramphenicol. Cells were further incubated in LB-chlor while shaking at 37° C. for 4 hours, after which the volume was brought to a total of 12 mL for each biological replicate. Replicates were split into 6 2 mL tubes, and phages of different dilutions were added to each tube. Cells were incubated with phage while shaking at 37° C. for 3 hours, after which they were plated on Bioassay plates with LB-agar supplemented chloramphenicol. After 16 hours of growth, all colonies were harvested by scraping and scraped and plasmid DNA was extracted with the NucleoBond Xtra MaxiPrep EF (740424.10, Takara Bio). Spacer sequences were PCR amplified from extracted plasmids and sequenced using a MiSeq (Illumina) with a paired-end 150 cycle kit.

### Example 26

### Cloning of Libraries and Screening for Beta-Lactamase and Transcribed/Non-Transcribed PFS Screens

[0370] Plasmid libraries for PFS screens were cloned from synthesized oligonucleotides (IDT) consisting of 7 randomized nucleotides either upstream or downstream of the spacer 1 target. To generate dsDNA fragments for cloning, the ssDNA oligonucleotides were annealed to a short primer for second strand synthesis by large Klenow fragment (M0210S, New England Biolabs). dsDNA fragments were Gibson cloned into digested pUC19, either at the 5′-end of the beta-lactamase (Ampicillin resistance) transcript (RNA targeting library), or in a non-transcribed region of pUC19 (DNA targeting library). Gibson clonings were electroporated into Endura Duo electro-competent cells (60240-1, Lucigen) and plated on Bioassay plates with LB-agar supplemented with ampicillin. After 16 hours of growth, all colonies were harvested by scraping and scraped and plasmid DNA was extracted with the NucleoBond Xtra MaxiPrep EF (740424.10, Takara Bio).

[0371] To screen libraries, we co-transformed 50 ng of the pooled ampicillin library and an equimolar amount of the Cas7-11 locus plasmid or pACYC184 plasmid control intoNovaBlue (DE3) Gigasingle competent cells (71227-3, EMD Millipore). After transformation, cells were plated on ampicillin and chloramphenicol to select for both plasmids. After 16 hours of growth, all colonies were harvested by scraping and scraped and plasmid DNA was extracted with the NucleoBond Xtra MaxiPrep EF (740424.10, Takara Bio). The target PFS region was PCR amplified and sequenced using a MiSeq (Illumina) with a single-end 150 cycle kit.

### Example 27

### Computational Analysis of In Vivo Screens

[0372] To determine enriched spacers from the bacteriophage interference screens, sequenced spacer regions were counted and normalized to total reads for each sample. For enriched spacers, enrichment was measured as the log 2 ratio compared to no phage dilution controls, with a pseudocount adjustment. PFS regions (both at 5′ and 3) from spacers above a 1.7 log 2 enrichment threshold in both biological replicates were used to generate sequence logos for the phage dilution samples.

[0373] For transcribed/non-transcribed (beta-lactamase) pUC19 PFS screens, PFS regions were extracted and computationally collapsed to 5 nt to have broader coverage. Collapsed PFS were counted and normalized to total reads for each sample. For a given PFS region, enrichment was measured as the log ratio compared to control (pACYC184 control), with a 0.01 pseudocount adjustment. PFSs above a 6 depletion threshold that were enriched in both biological replicates were collected and used to generate sequence logos (Crooks et al. 2004).

### Example 28

### Bacterial Phage Interference Assay for Individual Spacers

[0374] To test individual spacers for MS2 interference with drop plaque assays, complementary oligonucleotides encoding the spacer sequences (see Table 4) flanked by overhangs corresponding to the Cas7-11a Golden Gate acceptor sites were ordered from IDT. Oligonucleotides (final concentration 10M) were annealed in T4 ligase buffer (B0202S, New England Biolabs) supplemented with 5 units of T4 Polynucleotide Kinase (M0201S, New England Biolabs). The oligonucleotides were phosphorylated at 37° C. for 30 minutes and annealed by heating to 95° C. for 5 minutes followed by a 5° C./minute cool to 25° C. Annealed oligos were then cloned into the locus backbone by Golden Gate cloning. After verification by sequencing, clonal plasmids were transformed into NovaBlue(DE3) GigaSingle competent cells (71227-3, EMD Millipore) made competent with the Mix and Go kit (T3001, Zymo Research). Transformed GigaSingle cells were seeded from an overnight culture grown to OD600 of ˜2, at which point they were diluted 1:6 in Top Agar (10 g/L tryptone, 5 g/L yeast extract, 10 g/L NaCl, 7 g/L agar) and poured onto warm LB-chloramphenicol plates. Dilutions of MS2 phage in phosphate buffered saline were then spotted on the plates with a multichannel pipette, and plaque formation was recorded after overnight incubation.

### Example 29

### RFP Targeting and Growth Assay

[0375] Spacers (see Table 4) targeting RFP mRNA were Golden Gate cloned into the DisCas7-11a-only construct (as described above). After verification by sequencing, clonal plasmids were co-transformed with a tetracycline-inducible RFP plasmid on the pBR322 backbone (Addgene 79157). Colonies were picked into TB supplemented with ampicillin, chloramphenicol, and 50 ng/mL anhydrotetracycline final (631310, Takara Bio) and grown to saturation by shaking at 37° C. overnight. Cells were separated by centrifugation through a 40 μm filter plate (MANMN4010, EMD Millipore) and analyzed by flow cytometry on a FACSCanto II Cell Analyzer (BD Biosciences). Knockdown efficiency was quantified as the percent of RFP positive cells compared to a non-targeting spacer control.

### Example 30

### Cas7-11 Protein Purification

[0376] The E. coli codon-optimized genes for DisCas7-11a and GwCas7-11c, and the human codon-optimized gene for CjcCas7-11b were synthesized by Twist Biosciences, PCR amplified, and Gibson into a Twin-Strep-tag and SUMO tag bacterial expression vector (Addgene 90097). Sequence verified clonal Cas7-11 expression constructs were transformed into either T7 Express lysY Competent E. coli cells (C3010I, New England Biolabs), for DisCas7-11a and GwCas7-11c, or Rosetta(DE3)pLysS Competent Cells (70956-3, EMD Millipore), for CjcCas7-11b. Colonies were picked and grown overnight in TB supplemented with ampicillin. 10 ml of overnight culture was used to inoculate 1 L of TB supplemented with ampicillin, and the culture was grown by shaking at 37° C. until the OD600 reached 1. At this point, cultures were cooled at 4° C. for 30 minutes, and induced with IPTG (16758, Sigma) to a final concentration of 500 μM. Induced cultures were grown overnight (16-24 hours) by shaking at 18° C. After growth, Cells were harvested by centrifuged at 17,700×g for 15 min at 4° C., and the cell pellet was frozen at −80° C. for later purification.

[0377] Frozen cell paste was crushed and resuspended to a final concentration of 250 mg/mL in lysis Buffer (20 mM Tris-HCl, 500 mM NaCl, 1 mM DTT, pH 8.0) supplemented with Complete Ultra EDTA-free protease inhibitor tablets (5892953001, Sigma), 1 mg/mL lysozyme (L6876, Sigma) and 1 U/mL Benzonase nuclease (E1014, Sigma). Resuspension was performed by spinning for 30 minutes at 4° C. After resuspension, the solution was sonicated on ice with a 600W Ultrasonic Homogenizer (U.S. Solid) for 15 minutes with a 50% duty cycle. Sonicated lysate was cleared by centrifugation at 38,400×g for 1 hour at 4° C. The supernatant was supplemented with 1 mL of Strep-Tactin XT superflow high capacity resin (2-4030-010, IBA Life Sciences) and incubated with rotation for 1 hour at 4° C. Bound resin was loaded onto a glass Econo-Column (7371507, Bio-Rad) and washed with three column volumes of lysis buffer supplemented with Complete Ultra EDTA-free protease inhibitor tablets. To cleave protein off of bead-bound Twin-Strep-tag and SUMO tag, the resin was resuspended in 3 mL of SUMO digest buffer (30 mM Tris-HCl, 500 mM NaCl, 1 mM DTT, 0.15% NP-40, pH 8.0) supplemented with 100 ug of SUMO protease (purified in-house). Cleavage occurred on-column overnight at 4° C. with rotation, after which supernatant was drained from the column by gravity filtration and concentrated to a volume of 1 mL with a 100 kDa centrifugal filter (UFC810024, Sigma). Concentrated protein was loaded onto a gel filtration column (Superdex 200 Increase 10/300 GL, GE Healthcare Life Sciences) via an ÄKTA pure FPLC machine. The resulting fractions from gel filtration were analyzed by SDS-PAGE Stain-Free gels (4568096, Bio-Rad), and fractions containing protein were pooled, buffer exchanged into Storage Buffer (600 mM NaCl, 50 mM Tris-HCl pH 7.5, 5% glycerol, 2 mM DTT), quantified via comparison SDS-PAGE with a Bovine Serum Albumin (BSA) ladder, aliquoted, and frozen at −80° C. for storage.

### Example 31

### Nucleic Acid Target and Cas7-11 Pre-crRNA Preparation

[0378] RNA targets for testing cleavage and pre-crRNA targets were synthesized by in vitro transcription. Single stranded DNA oligonucleotide templates with a T7 RNA polymerase promoter appended at the 5′ end were synthesized by IDT, and converted to dsDNA by PCR and gel extraction. Gel extracted dsDNA products (˜1 μg/reaction) were used as input for the HiScribe T7 Quick High Yield RNA Synthesis kit (E2050S, New England Biolabs), with the 30 uL reaction size recommended for transcripts <300 nt. Transcription occurred overnight at 30° C., after which targets were purified with RNA Clean and Concentrator columns (R1017, Zymo Research). Labeling was performed with the 3′ EndTag End Labeling System (MB-9002, Vector Laboratories) and 5′ EndTag End Labeling System (MB-9001, Vector Laboratories), per the manufacturer's instructions, which was followed by incubation with 100x molar ratio of Cyanine5.5 maleimide (17080, Lumiprobe) at 65° C. for 30 minutes. We confirmed that this labeling was not 5′ or 3′ specific, but rather body labeling, via Rnase H gel assays (FIG. S21), likely due to the intercalating or groove-binding properties of Cyanine5.5 (Biver et al. 2005). After labeling, RNA was purified with RNA Clean and Concentrator columns (R1017, Zymo Research). All targets used for in vitro cleavage are listed in supplemental Table 5.

### Example 32

### Cas7-11 crRNA Preparation

[0379] crRNA designs were ordered from IDT as reverse complement DNA oligonucleotide templates with a T7 RNA polymerase promoter appended at the 5′ end. These templates were annealed with a T7 promoter oligonucleotide, generating a dsDNA promoter region. Annealing occurred in Taq Buffer (B9014S, New England Biolabs) with both oligonucleotides at 10 μM. 1 uL of the anneal reaction was used as input for the HiScribe T7 Quick High Yield RNA Synthesis kit (E2050S, New England Biolabs), with the 30 uL reaction size recommended for transcripts <300 nt. Transcription occurred overnight at 37° C., after which targets were purified with RNAClean XP beads (A63987, Beckman Coulter); beads were used at 3.3× volume ratio and supplemented with 3× volume of isopropanol. All crRNA used for in vitro cleavage are listed in supplemental Table 6.

### Example 33

### In Vitro Nuclease Assays

[0380] Unless otherwise indicated, in vitro nuclease assays were performed with 233 nM purified Cas7-11, 30 nM of labeled ssRNA target and 200 nM crRNA in nuclease assay buffer (40 mM Tris-HCl, 60 mM NaCl, 6 mM MgCl2, pH 7.5) supplemented with 4 U of RNase Inhibitor, Murine (M0314S, New England Biolabs). For pre-crRNA processing reactions, crRNA was omitted and pre-crRNA was used in place of labeled ssRNA target. Reactions were incubated for 1 hour at 37° C. (unless otherwise indicated) and then quenched with addition of proteinase K, EDTA, and urea (final concentrations 1 mg/mL proteinase K, 6 mM EDTA, and 400 uM Urea) for 15 minutes at 50° C. To prepare for gel electrophoresis, reactions were denatured with 4.5M urea denaturing buffer at 95° C. for 5 minutes and loaded onto a 10% Novex PAGE TBE-Urea gel (EC6885BOX, Invitrogen), which was run at 235V for 25 minutes at 60° C. Gels were imaged using an Odyssey scanner (LI-COR Biosciences).

### Example 34

### Experimental and Computational Analysis of In Vitro PFS Screens

[0381] In vitro PFS screens were reverse transcribed with a target specific primer using the qScript cDNA SuperMix (95048-025, Quanta Bio) and, the target PFS region was PCR amplified and sequenced using a MiSeq (Illumina) with a single-end 150 cycle kit. PFS regions were computationally extracted and collapsed to 5 nt to have broader coverage, and collapsed PFS were counted and normalized to total reads for each sample. For a given PFS region, enrichment was measured as the log ratio compared to non-targeting control, with a 0.01 pseudocount adjustment. PFSs above a 5 depletion threshold that were enriched in both experimental replicates were collected and used to generate sequence logos

### Example 35

### In Vitro Collateral Activity Assays

[0382] In vitro collateral activity assays were performed with 233 nM purified Cas7-11 or LwaCas13a, 10 nM of unlabeled ssRNA target and 200 nM crRNA in nuclease assay buffer (40 mM Tris-HCl, 60 mM NaCl, 6 mM MgCl2, pH 7.5) supplemented with 4U of RNase Inhibitor, Murine (M0314S, New England Biolabs) and 250 nM final concentration RnaseAlert V2 (4479768, Thermo Fisher Scientific). Reactions were incubated at 37° C. and activity was read continuously in the FAM channel of a Synergy Neo2 plate reader (BioTek).

### Example 36

### Electrophoretic Mobility Shift Assay (EMSA)

[0383] EMSA reactions were performed with dilutions of Cas7-11-crRNA complex with 10 nM of labeled ssRNA target in EMSA buffer (5 mM EDTA, 2.5% glycerol, 20 mM Tris, 5 μg/mL heparin, pH 7.5) supplemented with 4U of RNase Inhibitor, Murine (M0314S, New England Biolabs). Binding occurred by incubation at 37° C. for 20 minutes, after which reactions were mixed with 2x loading buffer (0.5×TBE buffer, 10% Ficoll, 18 mM EDTA) and run on a 6% Novex PAGE TBE gel (EC6265BOX, Thermo Fisher Scientific) at 180V for 30 min at 4° C. Gels were imaged using an Odyssey scanner (LI-COR Biosciences).

### Example 37

### Next-Generation Sequencing of In Vitro Cleaved RNA

[0384] In vitro nuclease assays were performed and samples were quenched as described above using unlabeled ssRNA targets. After quenching, samples were treated with alkaline phosphatase (EF0651, Thermo Fisher Scientific) and purified with RNA Clean and Concentrator columns (R1017, Zymo Research). Libraries were then treated with the same small RNA sequencing pipeline applied to in vivo crRNA species, with the RiboMinus depletion step omitted.

### Example 38

### Design and Cloning of Mammalian Constructs

[0385] To generate vectors for testing DisCas7-11a in mammalian cells, a mammalian codon optimized DisCas7-11a sequence was ordered from Twist Biosciences, PCR amplified, and cloned into a mammalian expression vector containing combinations of modifications, including with and without NLS tags or N- or C-terminal msfGFP fusions, all under the control of a CMV promoter.

[0386] The dual luciferase reporter was cloned by PCR amplifying Gaussia and Cypridinia luciferase coding DNA, the EF1 alpha and CMV promoters and assembled using the NEB Gibson Assembly (E2611S, New England Biolabs).

[0387] For mammalian DisCas7-11a guide expression, we synthesized both the full-length and mature DR sequences and cloned with golden-gate acceptor sites under U6 expression via restriction digest cloning. Individual guides were then cloned into the corresponding expression backbones for DisCas7-11a by golden-gate cloning. All mammalian DisCas7-11 plasmids are listed in Table 7. All DisCas7-11a guide sequences for knockdown or RNA editing experiments are listed in Table 8.

### Example 39

### Mammalian Cell Culture

[0388] All mammalian experiments were performed using the HEK293FT cell line (American Type Culture Collection (ATCC)). HEK293FT cells were grown in Dulbecco's Modified Eagle Medium with high glucose, sodium pyruvate, and GlutaMAX (Thermo Fisher Scientific), additionally supplemented with 1× penicillin-streptomycin (Thermo Fisher Scientific) and 10% fetal bovine serum (VWR Seradigm). We maintained cells below a confluency of 80%.

[0389] Transfections were performed using Lipofectamine 2000 (Thermo Fisher Scientific) in 96-well plates coated with poly-D-lysine (BD Biocoat). For transfections, cells were plated 16 hours prior to transfection at seeding densities of ˜20,000-30,000 cells per well, allowing cells to reach 90% confluency by transfection. For each well on the plate, transfection plasmids were combined with Opti-MEM I Reduced Serum Medium (Thermo Fisher) to a total of 25 μl. Separately, 24.5 μl of Opti-MEM was combined with 0.5 μl of Lipofectamine 2000. Plasmid and Lipofectamine solutions were then combined and incubated for 5-10 minutes, after which they were pipetted onto cells.

### Example 40

### Mammalian Cell RNA Knockdown Assays

[0390] To assess RNA knockdown in mammalian cells with reporter constructs, 100 ng of DisCas7-11a expression vector was co-transfected with 150 ng of guide expression plasmid and 40 ng of the knockdown reporter construct. After 48 hours, we harvested media containing secreted luciferase and measured luciferase activity using the Gaussia Luciferase Assay reagent (GAR-2B) (Targeting Systems) and Cypridina (Vargula) luciferase assay reagent (VLAR-2) (Targeting Systems) kits. Assays were performed in white 96 well plates on a plate reader (Biotek Synergy Neo 2) with an injection protocol. All replicates performed are biological replicates. Luciferase measurements were normalized by dividing the Gluc values by the Cluc values, thus normalizing for variation from well to well.

[0391] For targeting of endogenous genes, 100 ng of DisCas7-11a expression vector was co-transfected with 150 ng of guide expression plasmid. After 48 hours, we lysed cells and harvested RNA using a method previously described (Joung et al. 2017) with a gene-specific reverse transcription primers. Using Fast Advanced Master Mix (Thermo Fisher Scientific), we measured gene expression using the cDNA via qPCR and TaqMan qPCR probes for the KRAS, PPIB, CXCR4, and MALAT1 transcripts (Thermo Fisher Scientific) as well as the GAPDH control probe (Thermo Fisher Scientific). qPCR reactions were read out on a Bio-Rad CFX384 Touch Real-Time PCR Detection System, with four 5 μl technical replicates in 384-well format.

### Example 41

### RNA Editing in Mammalian Cells

[0392] To assess dDisCas7-11a-ADAR2dd editing activity in mammalian cells, we transfected 100 ng of dDisCas7-11a-ADAR2dd expression vector, 150 ng of guide expression plasmid, and 25 ng of the RNA editing reporter. After 48 hours, we harvested media from the cells, which should contain the secreted Gluc (normalization control) and Cluc (protein targeted for correction of W85X) proteins. If planning to sequence the RNA for the precise RNA editing levels, we also harvested RNA using a method previously described (Joung et al. 2017) with a gene-specific reverse transcription primer.

[0393] For luciferase measurements, we used undiluted media and the Gaussia Luciferase Assay reagent (GAR-2B) (Targeting Systems) and Cypridina (Vargula) luciferase assay reagent (VLAR-2) (Targeting Systems) kits. Assays were performed in white 96 well plates on a plate reader (Biotek Synergy Neo 2) with an injection protocol. All replicates performed are biological replicates. Luciferase measurements were normalized by dividing the Cluc values by the Gluc values, thus normalizing for variation from well to well. This ratio measurement could further be normalized by dividing by the non-targeting guide ratios.

[0394] For sequencing of RNA editing rates, we performed two rounds of PCR (NEBNext High-Fidelity 2×PCR Master Mix from New England Biolabs) using the extracted cDNA to add Illumina adaptors and sample barcodes. Illumina next generating sequencing was used to sequence editing rates in our prepared libraries on a MiSeq instrument. RNA editing rates were evaluated at the targeted adenosine in the W85X pre-termination codon.

### Example 42

### DisCas7-11-Mediated RNA-Guided RNA Interference Against MS2 Phage and RNA Knockdown in E. coli

[0395] DisCas7-11-mediated RNA-guided RNA interference against MS2 phage and RNA knockdown in E. coli was investigated. The potential role of PFS in the function of the III-E systems was assessed by performing randomized PFS screens on both a DNA-only target and an expressed target at the 5′ end of an ampicillin gene. It was found that there was no signal on the DNA-only target on either side of the protospacer (FIG. 28A) and only a weak sequence preference when cleaving the expressed target (FIG. 28B). Furthermore, it was found that there were no observable trends in the flanking sequences of enriched MS2 spacers (FIGS. 28C and 28D), suggesting a lack of targeting constraints.

### Example 43

### Regulation of DisCas7-11 Interference Activity by Accessory Proteins

[0396] The regulation of DisCas7-11 interference activity by accessory proteins was assessed. Whether accessory proteins in the D. ishimotonii subtype III-E CRISPR locus could modulate RNA interference activity was investigated (FIG. 28E). Expression of the full D. ishimotonii CRISPR locus resulted in reduced MS2 interference compared to DisCas7-11 alone (FIG. 28F), prompting us to test the deletion of each putative accessory gene. Deletion of Csx29 was found to restore the interference activity. (FIG. 28G).

### Example 44

### Mapping DisCas7-11a Cleavage Mechanism

[0397] The mapping of the DisCas7-11a cleavage mechanism via in vitro cleavage of ssRNA of a 31 nt target was investigated. The DisCas7-11a cleavage of synthetic 31 nt MS2 ssRNA with a 31 nt crRNA completely duplexed to the target shows two cleavage fragments that are generated in the targeting condition when protein is generated (indicated by red triangles) (FIG. 29). Other bands present in all conditions indicate incomplete products generated when in vitro transcribing the 31 nt target.

### Example 45

### DisCas7-11a-Mediated Knockdown of mRNA in Mammalian Cells

[0398] The effects of DisCas7-11a-mediated knockdown of mRNA in mammalian cells by guide variants or inactivating mutations was measured. The knockdown of Gaussia luciferase (Gluc) mRNA in mammalian cells by DisCas7-11a unmodified or with N−/C− terminal msfGFP fusions, with guides containing the full DR sequence was assessed. The guides are designed to be tiled across the Gluc transcript. The knockdown of Gluc mRNA in mammalian cells by DisCas7-11a unmodified or with N−/C− terminal msfGFP fusion, with guides containing the mature DR sequence was assessed. Guides are designed to be tiled across the Gluc transcript. The comparison of knockdown activity of Gluc mRNA in mammalian cells between active DisCas7-11a, catalytically inactive D429A/D654A DisCas7-11a, and GFP is illustrated in FIG. 31A. Guides are the same as in a and b above and have the full DR sequence. The comparison of knockdown activity of endogenous mRNA in mammalian cells between active DisCas7-11a, catalytically inactive D429A/D654A DisCas7-11a, and GFP is illustrated in FIG. 31B. Here the guides have the full DR sequence.

### Example 46

### RNA Editing Efficiency with DisCas7-11a-NES-ADAR2 Constructs

[0399] The RNA editing efficiency with active and inactive DisCas7-11a-NES-ADAR2 constructs was measured. The RNA A-to-I editing of Cypridinia luciferase (cluc) mRNA W85X mutation in mammalian cells by active DisCas7-11a-NES-ADAR2 or dead DisCas7-11a-NES-ADAR2 is shown in FIG. 32A. The guides are designed with mismatch distances between 2-50 nt. Editing is measured by restoration of Cluc luciferase activity and is normalized to the non-targeting guide condition. The RNA A-to-I editing of Cypridinia luciferase (cluc) mRNA W85X mutation in mammalian cells by active DisCas7-11a-NES-ADAR2 or dead DisCas7-11a-NES-ADAR2 is shown in FIG. 32B. The guides are designed with mismatch distances between 2-50 nt, and the editing is measured by amplicon sequencing and measuring the percent correction of the pre-termination stop codon.

### Example 47

### RNase H Cleavage of Target Showing Body Labeling

[0400] The RNase H cleavage of target showing body labeling was investigated. Cleavage of 3′ (FIG. 33A) and 5′ (FIG. 33B) labeled targeted by incubation with RNase H and indicated oligonucleotides show similar band patterns and double bands indicative of body labeling.

### Example 48

### Mechanism of the Programmable RNA Cleavage Activity of DisCas7-11

[0401] The mechanism of the programmable RNA cleavage activity of DisCas7-11 was assessed. The type III-E system from D. ishimotonii and corresponding effector DisCas7-11 were chosen, as a representative of type III-E systems to characterize in detail. The small RNA from D. ishimotonii were harvested and sequenced. Mature crRNA species indicative of pre-crRNA processing were identified (FIG. 2C), a hallmark of an active CRISPR-Cas locus. Heterologous reconstitution of the D. ishimotonii type III-E locus in E. coli demonstrated similar processing (FIG. 9A), and expression of the DisCas7-11 protein and pre-crRNA were both necessary and sufficient for mature crRNA expression (FIG. 9B and FIG. 9C), suggesting that Cas7-11 possesses pre-crRNA processing activity. Processing occurred though cleavage in the second hairpin of the direct repeat (DR) at residue 21, generating a mature rRNA with spacers of ˜18-24 nt and 14 nt DRs lacking any predicted secondary structure, similar to the mature DR tags of other type III systems (FIG. 2D). To generalize the observation of the processing activity of Cas7-11 beyond D. ishimotonii, the Candidatus Jettenia caeni type III-E locus through heterologous expression in E. coli was assessed. Robust processing of the C. Jettenia caeni pre-crRNA that resulted in mature crRNAs 37 nt in length was observed (FIG. 20), suggesting that pre-crRNA processing activity is common among type III-E systems.

[0402] One skilled in the art will appreciate further features and advantages of the invention based on the above-described embodiments. Accordingly, the invention is not to be limited by what has been particularly shown and described, except as indicated by the appended claims. All publications and references cited herein are expressly incorporated herein by reference in their entirety.

The application's sequence listing, which the Patent Office published only in electronic form, follows.

SEQUENCE LISTING (647 sequences)

SEQ ID NO: 1 - protein, 1812 aa, Unknown
  source: /note="Description of Unknown: Candidatus Jettenia caeni sequence"
MHTILPIHLTFLEPYRLAEWHAKADRKKNKRYLRGMSFAQWHKDKDGIGKPYITGTLLRSAVLNAAEELISLNQGMWAKEPCCNGKFETEKDKPAVLRKRPTIQWKTGRPAICDPEKQEKKDACPLCMLLGRFDKAGKRHRDNKYDKHDYDIHFDNLNLITDKKFSHPDDIASERILNRVDYTTGKAHDYFKVWEVDDDQWWQFTGTITMHDDCSKAKGLLLASLCFVDKLCGALCRIEVTGNNSQDENKEYAHPDTGIITSLNLKYQNNSTIHQDAVPLSGSAHDNDEPPVHDNDSSLDNDTITLLSMKAKEIVGAFRESGKIEKARTLADVIRAMRLQKPDIWEKLPKGINDKHHLWDREVNGKKLRNILEELWRLMNKRNAWRTFCEVLGNELYRCYKEKTGGIVLRFRTLGETEYYPEPEKTEPCLISDNSIPITPLGGVKEWIIIGRLKAETPFYFGVQSSFDSTQDDLDLVPDIVNTDEKLEANEQTSFRILMDKKGRYRIPRSLIRGVLRRDLRTAFGGSGCIVELGRMIPCDCKVCAIMRKITVMDSRSENIELPDIRYRIRLNPYTATVDEGALFDMEIGPEGITFPFVFRYRGEDALPRELWSVIRYWMDGMAWLGGSGSTGKGRFALIDIKVFEWDLCNEEGLKAYICSRGLRGIEKEVLLENKTIAEITNLFKTEEVKFFESYSKHIKQLCHECIINQISFLWGLRSYYEYLGPLWTEVKYEIKIASPLLSSDTISALLNKDNIDCIAYEKRKWENGGIKFVPTIKGETIRGIVRMAVGKRSGDLGMDDHEDCSCTLCTIFGNEHEAGKLRFEDLEVVEEKLPSEQNSDSNKIPFGPVQDGDGNREKECVTAVKSYKKKLIDHVAIDRFHGGAEDKMKFNTLPLAGSFEKPIILKGRFWIKKDIVKDYKKKIEDAMVDIRDGLYPIGGKTGIGYGWVTDLTILNPQSGFQIPVKKDISPEPGTYSTYPSHSTPSLNKGHIYYPHYFLAPANTVHREQEMIGHEQFHKEQKGELLVSGKIVCTLKTVTPLIIPDTENEDAFGLQNTYSGHKNYQFFHINDEIMVPGSEIRGMISSVYEAITNSCFRVYDETKYITRRLSPEKKDESNDKNKSQDDASQKIRKGLVKKTDEGFSIIEVERYSMKTKGGTKLVDKVYRLPLYDSEAVIASIQFEQYGEKNEKRNAKIRAAIKRNEVIAEVARKNLIFLRSLTPEELKKVLQGEILVKFSLKSGKNPNDYLAELHENGTERGLIKFTGLNMVNIKNVNEEDKDFNDTWDWEKLNIFHNAHEKRNSLKQGYPRPVLKFIKDRVEYTIPKRCERIFCIPVKNTIEYKVSSKVCKQYKDVLSDYEKNFGHINKIFTTKIQKRELTDGDLVYFIPNEGADKTVQAIMPVPLSRITDSRTLGERLPHKNLLPCVHEVNEGLLSGILDSLDKKLLSIHPEGLCPTCRLFGTTYYKGRVRFGFANLMNKPKWLTERENGCGGYVTLPLLERPRLTWSVPSDKCDVPGRKFYIHHNGWQEVLRNNDITPKTENNRTVEPLAADNRFTFDVYFENLREWELGLLCYCLELEPGMGHKLGMGKPMGFGSVKIAIERLQTFTVHQDGINWKPSENEIGVYVQKGREKLVEWFTPSAPHKNMEWNGVKHIKDLRSLLSIPGDKPTVKYPTLNKDAEGAISDYTYERLSDTKLLPHDKRVEYLRTPWSPWNAFVKEAEYSPSEKSDEKGRETIRTKPKSLPSVKSIGKVKWFDEGKGFGILIMDDGKEVSISKNSIRGNILLKKGQKVTFHIVQGLIPKAEDIEIAK

SEQ ID NO: 2 - protein, 1717 aa, Unknown
  source: /note="Description of Unknown: Candidatus Scalindua brodae sequence"
MNITVELTFFEPYRLVEWFDWDARKKSHSAMRGQAFAQWTWKGKGRTAGKSFITGTLVRSAVIKAVEELLSLNNGKWEGVPCCNGSFQTDESKGKKPSFLRKRHTLQWQANNKNICDKEEACPFCILLGRFDNAGKVHERNKDYDIHFSNFDLDHKQEKNDLRLVDIASGRILNRVDFDTGKAKDYFRTWEADYETYGTYTGRITLRNEHAKKLLLASLGFVDKLCGALCRIEVIKKSESPLPSDTKEQSYTKDDTVEVLSEDHNDELRKQAEVIVEAFKQNDKLEKIRILADAIRTLRLHGEGVIEKDELPDGKEERDKGHHLWDIKVQGTALRTKLKELWQSNKDIGWRKFTEMLGSNLYLIYKKETGGVSTRFRILGDTEYYSKAHDSEGSDLFIPVTPPEGIETKEWIIVGRLKAATPFYFGVQQPSDSIPGKEKKSEDSLVINEHTSFNILLDKENRYRIPRSALRGALRRDLRTAFGSGCNVSLGGQILCNCKVCIEMRRITLKDSVSDFSEPPEIRYRIAKNPGTATVEDGSLFDIEVGPEGLTFPFVLRYRGHKFPEQLSSVIRYWEENDGKNGMAWLGGLDSTGKGRFALKDIKIFEWDLNQKINEYIKERGMRGKEKELLEMGESSLPDGLIPYKFFEERECLFPYKENLKPQWSEVQYTIEVGSPLLTADTISALTEPGNRDAIAYKKRVYNDGNNAIEPEPRFAVKSETHRGIFRTAVGRRTGDLGKEDHEDCTCDMCIIFGNEHESSKIRFEDLELINGNEFEKLEKHIDHVAIDRFTGGALDKAKFDTYPLAGSPKKPLKLKGRFWIKKGFSGDHKLLITTALSDIRDGLYPLGSKGGVGYGWVAGISIDDNVPDDFKEMINKTEMPLPEEVEESNNGPINNDYVHPGHQSPKQDHKNKNIYYPHYFLDSGSKVYREKDIITHEEFTEELLSGKINCKLETLTPLIIPDTSDENGLKLQGNKPGHKNYKFFNINGELMIPGSELRGMLRTHFEALTKSCFAIFGEDSTLSWRMNADEKDYKIDSNSIRKMESQRNPKYRIPDELQKELRNSGNGLFNRLYTSERRFWSDVSNKFENSIDYKREILRCAGRPKNYKGGIIRQRKDSLMAEELKVHRLPLYDNFDIPDSAYKANDHCRKSATCSTSRGCRERFTCGIKVRDKNRVFLNAANNNRQYLNNIKKSNHDLYLQYLKGEKKIRFNSKVITGSERSPIDVIAELNERGRQTGFIKLSGLNNSNKSQGNTGTTFNSGWDRFELNILLDDLETRPSKSDYPRPRLLFTKDQYEYNITKRCERVFEIDKGNKTGYPVDDQIKKNYEDILDSYDGIKDQEVAERFDTFTRGSKLKVGDLVYFHIDGDNKIDSLIPVRISRKCASKTLGGKLDKALHPCTGLSDGLCPGCHLFGTTDYKGRVKFGFAKYENGPEWLITRGNNPERSLTLGVLESPRPAFSIPDDESEIPGRKFYLHHNGWRIIRQKQLEIRETVQPERNVTTEVMDKGNVFSFDVRFENLREWELGLLLQSLDPGKNIAHKLGKGKPYGFGSVKIKIDSLHTFKINSNNDKIKRVPQSDIREYINKGYQKLIEWSGNNSIQKGNVLPQWHVIPHIDKLYKLLWVPFLNDSKLEPDVRYPVLNEESKGYIEGSDYTYKKLGDKDNLPYKTRVKGLTTPWSPWNPFQVIAEHEEQEVNVTGSRPSVTDKIERDGKMV

SEQ ID NO: 3 - protein, 1659 aa, Unknown
  source: /note="Description of Unknown: Desulfobacteraceae bacterium 4572_88 sequence"
MKITLRFLEPFRMLDWIRPEERISGNKAFQRGLTFARWHKSKADDKGKPFITGTLLRSAVIRAAEHLLVLSKGKVGEKACCPGKFLTETDTETNKAPTMFLRKRPTLKWTDRKGCDPDFPCPLCELLGPGAVGKKEGEAGINSYVNFGNLSFPGDTGYSNAREIAVRRVVNRVDYASGKAHDFFRIFEVDHIAFPCFHGEIAFGENVSSQARNLLQDSLRFTDRLCGALCVIRYDGDIPKCGKTAPLPETESIQNAAEETARAIVRVFHGGRKDPEQAQIDKAEQIQLLSAAVRELGRDKKKVSALPLNHEGKEDHYLWDKKAGGETIRTILKAAAEKEAVANQWRQFCIELSEELYKEAKKAHGGLEPARRIMGDAEFSDKSVPDTVSHSIGISVEKETIIMGTLKAETPFFFGIESKEKKQTDLMLLLDGQNHYRIPRSALRGILRRDIRSVLGTGCNAEVGGRPCLCPVCRIMKNITVMDTRSSTDTLPEVRPRIRLNPFTGSVQEKALFNMEMGTEGIEFPFVLSYRGKKTLPKELRNVLNWWTEGKAFLGGAASTGKSIFQLSDIHAFSSDLSDETARESYLSNHGWRGIMENSIVHESPLEGGAGGCSFGLSDLPKLGWHAEDLKLSDIEKYKPFHRQKISVKITLNSPFLNGDPVRALTEDVADIVSFKKYTQGGEKIIYAYKSESFRGVVRTALGLRNQGNDDITGKKNVPLIALTHQDCECMLCRFFGSEYEAGRLYFEDLTFESEPEPRRFDHVAIDRFTGGAVNQKKFDDRSLVPGKEGFMTLIGCFWMRKDKELSRNEIEELGKAFADIRDGLYPLGAKGSMGYGQVAELSIVDDEDSDDENNPAKLLAESMKNASPSLGTPTSLKKKDAGLSLRFDENADYYPYYFLEPEKSVHRDPVPPGHEEAFRGGLLTGRITCRLTVRTPLIVPNTETDDAFNMKEKAGKKKDAYHKSYRFFTLNRVPMIPGSEIRGMISSVFEALSNSCFRIFDEKYRLSWRMDADVKELEQFKPGRVADDGKRIEEMKEIRYPFYDRTYPERNAQNGYFRWDARISLTDNSMRKMEKDGVPRNVIYKLNTLKNKAYKSEKSFLFDLKNKAGGVGRYKKLVLKHAEVRGGEIPYYSHPTPTDCKLLSLVGPNRQLCRQDTLVQYRIIKHRRGAKPEEDFMFVGTPSENQKGHKENNDHGGGYLKISGPNKIEKENVLTSGVPSVPENMGAVVHNCPPRLVEVTVRCGRKQEEECKRKRLVPEYVCADPEKKVTYTMTKRCERIFLEKSRRIIPFTNDAVDKFEILVKEYRRNAEQQDTPEAFQTILPENGTVNPGDLLYFREEKGKAAEIVPVRISRKVDDRHIGKRIDPELRPCHGEWIEDGDLSKLDAYPAEKKLLTRHPKGLCPACRVFGTGSYKSRVRFGFAALKGTPKWLKEDPAEPSQGKGITLPLLERPRPTWAVLHNDKENSEIPGRKFYVHHNGWKGISEGIHPISGENIEPDENNRTVEVLDKGNRFVFELSFENLEPRELGLLIHSLQLEKGLAHKLGMAKSMGFGSVEIDVESVRVKHRSGEWDYKDGETVDGWIEEGKRGVAAKGKANDLRKLLYLPGEKQNPHVHYPTLKKEKKGDPPGYEDLKKSFREKKLNRRKMLTTLWEPWHK

SEQ ID NO: 4 - protein, 1657 aa, Unknown
  source: /note="Description of Unknown: Candidatus Magnetomorum sp. HK-1 sequence"
MLKLKVKITYFQPFRVIPWIKEDDRNSDRNYLRGGTFARWHKDKKDDIHGKPYITGTLLRSALFTEIEKIKIHHSDFIHCCNAIDRTEGKHQPSFLRKRPVYTENKNIQACNKCPLCLIMGRGDDRGEDLKKKKHYNGKHYQNWTVHFSNFDTQATFYWKDIVQKRILNRVDQTCGKAKDFFKVCEVDHIACPTLNGIIRINDEKLSQEEISKIKQLIAVGLAQIESLAGGICRIDITNQNHDDLIKSFFETKPSKILQPNLKESGEERFELAKLELLAEYLTQSFDANQKEQQLRRLADAIRDLRKYSPDYLKDLPKGKKGGRTSIWNKKVADDFTLRDCLKNQKIPNELWRQFCEGLGREVYKISKNISNRSDAKPRLLGETEYAGLPLRKEDEKEYSPTYQNQESLPKTKWIISGELQAITPFYIGHVNKTSHTRSTIFLNMNGQFCIPRSTLRGALRRDLRLVFGDSCNTPVGSRVCYCQVCQIMRCIKFEDALSDVDSPPEVRHRIRLNCHTGVVEEGALFDMETGFQGMIFPFRLYYESKNEIMSQHLYEVLNNWTNGQAFFGGEAGTGFGRFKLLNNEVFLWEIDGEEEDYLQYLFSRGYKGIETDEIKKVADPIKWKTLFTKLEIPPEKIPLTQLNYTLTIDSPLISRDPIAAMLDNRNPDAVMVKKTILVYEQDSSTHKNVPKEVPKYFIKSETIRGLLRSIISRTEIKLEDGKKERIFNLDHEDCDCLQCRLFGNVHQQGILRFEDAEITNKNVSDCCIDHVAIDRFTGGGVEKMKFNDYPLSASPKNCLNLKGSIWITSALKDSEKEALSKALSELKYGYASLGGLSAIGYGRVKELTLEENDIIQLTEITESNLNSQSRLSLKPDVKKELSNNHFYYPHYFIKPAPKEVVRESRLISHVQGHDTEGEFLLTGKIKCRLQTLGPLFIANNDKGDDYFELQHNNPGHLNYAFFRINDHIAIPGASIRGMISSVFETLTHSCFRVMDDKKYLTRRVIPESETTQKRKSGRYQVEESDPDLFPGRVQKKGNKYKIEKMDEIVRLPIYDNFSLVERIREYHYSEECASYVPSVKKAIDYNRMLAQAADSNREFLYNHPEAKSILQGKKEVYYILHKQESKNRGKTKEINPNARYACLTDENTPGSRKGFIKFTGPDMVTVNKELKSKIAPIYDPEWEKDIPDWERSNQESNHKYSFILHNEIEMRSSQKKKYPRPVFICKKNGVEYRMQKRCERIFDFTKEEEKDKEIVIPQKVVSQYNAILKDNKENTETIPGLFNSKMVNKELEDGDLVYFKYKEGKVTELTPVAISRKTDNKPMGKRFPKISINGKMKPNDSLRSCSHTCTEDCDDCPNLCESVKDYFKPHPDGLCPACHLFGTTFYKSRLSFGLAWLENNAKWYISNDFQQKDSKKEKGGKLTLPLLERPRPTWSMPNNNAEVPGRKFYVHHPWSVENIKNNQGNQKDISLKPDSDAIKIKENNRTIEPLGKDNVFNFEISFNNLRDWELGLLLYAIELEDHLAHKLGMAKAFGMGSVKIEIKNLLIKGSINDISKAELIKKGFKKLGIDSLEKDDLSEYLHIKQLREILWFSDKPVGTIEYPKLENKTNSRIPSYTDFVQEKDHETGFKNPKYQNLKSRLHILQNPWNAWWKNEE

SEQ ID NO: 5 - protein, 1601 aa, Desulfonema ishimotonii
MTTTMKISIEFLEPFRMTKWQESTRRNKNNKEFVRGQAFARWHRNKKDNTKGRPYITGTLLRSAVIRSAENLLTLSDGKISEKTCCPGKFDTEDKDRLLQLRQRSTLRWTDKNPCPDNAETYCPFCELLGRSGNDGKKAEKKDWRFRIHFGNLSLPGKPDFDGPKAIGSQRVLNRVDFKSGKAHDFFKAYEVDHTRFPRFEGEITIDNKVSAEARKLLCDSLKFTDRLCGALCVIRFDEYTPAADSGKQTENVQAEPNANLAEKTAEQIISILDDNKKTEYTRLLADAIRSLRRSSKLVAGLPKDHDGKDDHYLWDIGKKKKDENSVTIRQILTTSADTKELKNAGKWREFCEKLGEALYLKSKDMSGGLKITRRILGDAEFHGKPDRLEKSRSVSIGSVLKETVVCGELVAKTPFFFGAIDEDAKQTDLQVLLTPDNKYRLPRSAVRGILRRDLQTYFDSPCNAELGGRPCMCKTCRIMRGITVMDARSEYNAPPEIRHRTRINPFTGTVAEGALFNMEVAPEGIVFPFQLRYRGSEDGLPDALKTVLKWWAEGQAFMSGAASTGKGRFRMENAKYETLDLSDENQRNDYLKNWGWRDEKGLEELKKRLNSGLPEPGNYRDPKWHEINVSIEMASPFINGDPIRAAVDKRGTDVVTFVKYKAEGEEAKPVCAYKAESFRGVIRSAVARIHMEDGVPLTELTHSDCECLLCQIFGSEYEAGKIRFEDLVFESDPEPVTFDHVAIDRFTGGAADKKKFDDSPLPGSPARPLMLKGSFWIRRDVLEDEEYCKALGKALADVNNGLYPLGGKSAIGYGQVKSLGIKGDDKRISRLMNPAFDETDVAVPEKPKTDAEVRIEAEKVYYPHYFVEPHKKVEREEKPCGHQKFHEGRLTGKIRCKLITKTPLIVPDTSNDDFFRPADKEARKEKDEYHKSYAFFRLHKQIMIPGSELRGMVSSVYETVTNSCFRIFDETKRLSWRMDADHQNVLQDFLPGRVTADGKHIQKFSETARVPFYDKTQKHFDILDEQEIAGEKPVRMWVKRFIKRLSLVDPAKHPQKKQDNKWKRRKEGIATFIEQKNGSYYFNVVTNNGCTSFHLWHKPDNFDQEKLEGIQNGEKLDCWVRDSRYQKAFQEIPENDPDGWECKEGYLHVVGPSKVEFSDKKGDVINNFQGTLPSVPNDWKTIRTNDFKNRKRKNEPVFCCEDDKGNYYTMAKYCETFFFDLKENEEYEIPEKARIKYKELLRVYNNNPQAVPESVFQSRVARENVEKLKSGDLVYFKHNEKYVEDIVPVRISRTVDDRMIGKRMSADLRPCHGDWVEDGDLSALNAYPEKRLLLRHPKGLCPACRLFGTGSYKGRVRFGFASLENDPEWLIPGKNPGDPFHGGPVMLSLLERPRPTWSIPGSDNKFKVPGRKFYVHHHAWKTIKDGNHPTTGKAIEQSPNNRTVEALAGGNSFSFEIAFENLKEWELGLLIHSLQLEKGLAHKLGMAKSMGFGSVEIDVESVRLRKDWKQWRNGNSEIPNWLGKGFAKLKEWFRDELDFIENLKKLLWFPEGDQAPRVCYPMLRKKDDPNGNSGYEELKDGEFKKEDRQKKLTTPWTPWA

SEQ ID NO: 6 - protein, 1573 aa, Unknown
  source: /note="Description of Unknown: Candidatus Brocadia fulgida sequence"
MSKTDDKIDIKLTFLEPYRMVNWLENGLRMTDPRYLRGLSFARWHRNKNGKAGRPYITGTLLRSAVIRAAEELLSLNLGKWGKQLCCPGQFETEREMRKNKTFLRRRPTPAWSAETKKEICTTHGSACAFCLLLGRRLHGGKEDVNEDAPGSCRKPVGFGNLSLPFQPTKRQIQDVCKERVLNRVDFRTGKAQDYFRVFEIDHEDWGVYTGEITITEPRVQEMLEASLKFVDTLCGALCRIEIVGSADETKRTTSSKEGCPASTTTRDCSSSENDDTSPEDPVREDLKKIAHVIANAFQNSGNREKVHALADAIRAMRLEESSIINTLPKGKSEKTTEQIEVNKHYLWDEIPVNDTSVRHILIEQWRRWQSKKDDPEWWKFCDFLGECLYKEYKKLTSGIQSRARVMGETEYYGALGMPDKVIPLLKSDKTKEWILVGSLKAETPFFFGLETEQTEEVEHTSLRLVMDKKGRFRIPRSVLRGALRRDMRIAFDSGCDVKLGSPLPCDCSVCQVMRSITIKDSRSEAGKLPQIRHRIRLNPFSGTVDEGALFDIEVAPEGVIFPFVMRYRGEEFPPALLSVIRYWQDGKAWLGGEGATGKGRFALAKDLKMYEWKLEDKSLHAYIDTYGHRGNEHAIGTGQGIDGFRSGSLSDLLSDISKESFRDPLASYHNYLDKRWIKVGYQITIGAPLLSADPIGALLDPNNVDAIVFEKMKLDGDQVKYLPAIKGETIRGIVRTALGKRNNLLAKNDHDDCTCSLCAIFGNENETGKIRFEDLEVYDKDIAKKIDHVAIDRFTGGARDQMKFDTLPLIGSPERPLRLKGLFWMRRDVSPDEKARILLAFLEIREGLYPIGGKTGSGYGWVSDLEFDGDAPEAFKEMNSKRGKQASFKEKISFRYPSGAPKHIQNLKATSFYYPHYFLEPGSKVIREQKMIGHEQYYESYPSGASGEKLLSGRIICSMTTHTPLIVPDTGVIKDPENKHATYDFFQMNNAIMIPGSEIRGMISAVYEAMTNSCFRIFHEKQYLTRRISPEDKELREFIPGIVRIINGDVYIEKAEREYRLPLYDDVHIITNYEELEYEKYIKKNPGREQKIKNAHRFNKNIARIAESNRNYLCSLDRAVRREILSGRKKVNFRLVKVNDNKNPDKEAVELCKTGPLEGLVKFSGLNAVNISNLRPGTAEEGFDAKWDMWSLNIILNRMDVRNSQKKEYPRPALHFNHDGKEYTIPKRCERVFVRAEAGKRAETEGSYKVPRKVQEQYQNILRDYESNIGHIDNTFRTLIENCGLNNGSLVYFKPDNSRKEVVAITPVKISRKTDRLPQGDRFPHTSSDLRPCVRDCLDTEGDIRMLENSPFKRLFHIHPEGLCPACQLFGTTNYRGRVRFGFASLSDGPKWFRKDEGNETCHITLPLLERPRPTWSMPDDTSTIPGRKFYVHHMGYETVKKNQRTLVKTENNRTVKALDKENEFTFEVFFENLREWELGLLLHCLELEPEMGHKLGMGKPLGFGSVKIRIDKLQKCVVNVKDGCVLWEPEEDKIQHYIAKGLGKLTTWFGKEWDRLEHIQGLRSLQRLLPL

SEQ ID NO: 7 - protein, 1526 aa, Unknown
  source: /note="Description of Unknown: Deltaproteobacteria bacterium sequence"
FESYARWCKSNSGLWKPYIPGTLLRSAVLESVEYLLALIGSKNKVEICPGLYTQSENNPDTKYLRRRPWYELHAQKEICKTRDTACPLCLLMRTKLDNDGDGETEKNVKFGNLYPTSPLEPLQKIRPRILNRMDPGTSKARDYFRVFEIENQLCSQFRGWIWLSGDLPNMELVKSLLAAGLSNVATLAGAVCRIRIVSTDNPSMKQDLTTQDLIDDFTNYYLKGDTPPANLAASGKGDAFPRFSPGSGDHPDTTGVSHADMASSHEGTALAKDIAEKCKDILSQISASEQLRRLADIMRDLRQDSNREIMYRQVAEENHEKASLLYKKTKKGDSIAALIAGKTEGMDAETWRRLCEFLGQTFYGEAKEAGLVETPVPRILGESERYSLQKKPTVRTDLAAELVPDIEFIIKGNLIAETPFFFGTDIATETHTDLPILLTSDRHFRIPRSVLRGILRRDLRLVTGSGCSVKLGRSEPCACDVCQIMRSLTMRDCVSSCKVPPEIRHRIRLNPVTETVEEGALFDMEIGPQGISFPFVLRSRGVNSSFSTRLKNVLTWWSEGKIFMGGDKGTGKGRFTLAELEAYYFRLTTKRIGKNVWVIGNYLKSQGWRGAELETHFDSLKEWKSLSFSDSDVKVFTWHKITWKVSFEGPVLTNDPIAADIRNESDAVFYQKSVAGEKGPVYALKGEGLRGIVSSSLCKKKNLSSNLHEDCECLRCKIFGSKHQEGNIRFEDMTVSQESEVREKLFDHVSIDRFTGGAANKLKFDDKPLVGNPLVFQGVFWVHQSIGNNEKTQEALSDAFKDVRDGLYPVGAKGSIGYGWIKGIEVVEGPDWLKDALSAEKTVEAGIASEESEYKLPDLPWISLLPKGRAIYNPHYFLGIPKVTPEREREPVGHDRFQTDLHTGRIICTLKTITPLIIPDTENDKAFEVENASADHERFKFMRMGSQAAIPGSAIRSMTSSVFEALTNSCFRVLDQKSHLSWRMEADDAGDYKPGRFEKKDDKAVIRKFKKKARFPFYAGPDTREAFTSDQIMGKEKVTLWVKDFEASLTVPDEIGWKKKRGYLKVTGPNKVEIDTENISENNPSPPDSWQDVRINDDGTIPDKKNRKFICQYGTTTYTVDKWCEAFFCDEEKDPYELAPDVERKYRLLMDSYHNNPQAPPQIFRSLPLFSETGPKKTLEHGDLVYFRLSEVNKQSQSKKQVRERVTDIVPVSISRIANNQPIGKHIAAAFRPCAYVCIEECEPCDAKTCPIPVYREGYPIKGLCRACHLFGTTGYKGRVRFSFAKLNGDAVWAKGAGGKDYFTLPLLEKPRPTWTMPNEGAKIPGRKFYVHHNEWKTVQEGKNPIDQKAIRPNPNNSSVEVLNLGNEFQFEVSFENLEEWELGLLLYCLELEPGLAHKLGRGKAFGFGSIEAEVSKIEMRIKSGTWKNETSGKEKFIQSGLSQVPSFFKQDEKQWNKVEQVKNIRKLLQLSWNKGNAVEPEVRYPALREKDDENKRPGYVELKDNGYDAGKKLVSPWAPWHPIKK

SEQ ID NO: 8 - protein, 1403 aa, Unknown
  source: /note="Description of Unknown: Deltaproteobacteria bacterium RIFOXYD12_FULL_50_9 sequence"
  MOD_RES (1394)..(1396): Any amino acid
MTKKPGTEDKATLWGKESASKSVKTILEESIQGFTVEQKRSFFANLADQLVSRAGEQGAKSVRSQGLIIGRKENYAKPSAQEPTRHHLYRQPSNASAFLATGWLIAETPFFIGSGTEGQKQTDDQAESLHLRTLRDGHGRFRIPFTTIRGVMDKELRDILQAGCAKGRSLRAPCPCQVCTLMRRIQVRDAIAADILPPDLRMRTRIDPSHGTVAHLFSLEMAPQGLKLPFFLKLKGVETIDPDKELLEILNDWSAGQCFLGGLWGTGKGRFRLDDLQWHRLELDNADYYTPLLQDRFFAGETISDLRQGLQSINIQPERIPAQTPSRNMPYCRVDCILEFKSPVLSGDPVAALFESDAPDNVAYKKPVVQYDETGRLRTTDPGPVEMLTCLKGEGVRGVVAYLAGKAYDQHDLSHDSCNCTFCQAFGNGQKAGSLRFDDFMPVQFESDQAGNFSWSPHTPHAMRSDRVALDVFGGAMPEAKFDDRPLAASPGKPLNFKSTIWYREDMGKEAGKALKRALIDLQNNMAAIGSGGGIGRGWVSRVCFEGDIPDFLEDFPEPITVTEPEQDSQLLKNQAVADETAVSACDTADAPHPLAVTLEPGARYFPRVIIPRAPTVKRDECVTGQRYHTGRLSGKIFCELNTLGPLFVPDTDYSAGVPVPISDEQLAECQLQAVFENTSKFNEFFATYPEETVTKLKDLLCAADDKWILAVKDITADLRQEIGEDTFQRIIRKAGHKTQRFHQINDEIGLPGASLRGMVLSNYQILTNSCYRNLKATEEITRRMPADEAKYRKAGRVTVSGDGAQKKYSIQEMEVLRLPIYDNMNTPDNMPDVAKQATTAKRCNNLMNEAAKTSRVELKARWREGQSKIKYQIIDALNKVDPIIQVISSSKQINPNNGKTGWGYVKYTGANVFAKSLVAPIDCLRKKDAGHVCCQVNLNPAWEASNFDILINEKCPVERQSGPRPTLRCKGQDSAWYTLTKRSERIFTDKKPVPDPINIPPREVKRYNELRDSYKKNTAHVPKPLQTFFNQESLANGDLVYFEVNQFGEASQLTPVSISRTTDLFPIGGRLPQGHKDLFPCTAMCLSECKNCVPASFCEFHSRSHEKLCPACSLAGTTGNRGRIKFSEAWLSGLPKWHSVSQDNVGRGLGVTMPRLERSRRTWHLPTKDAYLLGQSIYLNHPVPAILPSDQVPSENNQTVEPLGPKNIFSFQLAFDNLSIEELGLLLYSLELESGMAHRLGRGRALGMGSVQISVKDIQIRDNKSFLFSSNISKKSEWIQCGKDEFAQEAWFGESWDNIDHIQRLRQALTIPVKGDVGCIRYPKLEAEGGMPDYIKLRKRLTPLCDREEPVRYRINPVQLARMILPFVPWHGACPALLNEQVMIEAKRLTELXXXDRANWPC

SEQ ID NO: 9 - protein, 1367 aa, Unknown
  source: /note="Description of Unknown: Deltaproteobacteria bacterium sequence"
ASEDDDTPTLRKVLKDEINGQEDMWRKFCEALGNSLYDLSKKAKERKRTEALPRLLGETEIYGLPMRENKEDEPLPSSLTYKFKWLIAGELRAETPFFFGTEVQEGQTSATILLNRDGYFRLPRSVIRGALRRDLRLVMGNDGCNMPIGGQMCECGVCRVMRHIVIEDGLSDCKIPPEVRHRIRLNCHTGTVEEGALFDMETGYQGMTFPFRLYCETENSDLDSYLWEVLNNWQNGQSLFGGDTGTGFGRFELTEPKVFLWNFSKKEKHEAYLLNRGFKGQMPVQDVKTKSFKTKTWFQIHRELDISPKKLPWYSTDYRFNVTSPLISRDPIGAMLDPRNTDAIMVRKTVFCPDPNAKNRPAPATVYMIKGESIRGILRSIVVRNEELYDTDHEDCDCILCRLFGSIHQQGSLRFEDAEVQNSVSDKKMDHVAIDRFTGGGVDQMKFDDYPLPGCPAQPLILEGKFWVKDDIDDESKSALEKAFADFRDGLVSLGGLGAIGYGQIGDFELIGGSADWLNLPKPEENRTDVPCGDRSAQGPEIKISLDADKIYHPHFFLKPSDKNVYRERELVSHAKKKGPDGKSLFTGKITCRLSTEGPVFIPDTDLGEDYFEMQASHKKHKNYGFFRINGNVAIPGSSIRGMISSVFEALTNSCFRVFDQERYLSRSEKPDPTELTKYYPGKVKRDGNKFFILKMKDFFRLPLYDFDFEGEAESLRPNYDEDRNEEENKGKNKNTQKVKNAVEFNIKMAGFAKHNRDFLKKYKEQEIKDIFMGKKKVYFTAGKHKPNEAHDNDKIALLTKGSNKKAEKGYFKFTGPGMVNVKAGVEGEECDFHIDESDPDVYWNMSSILPHNQIKWRPSQKKEYPRPVLKCVKDGTEYVMLKRSEHVFAEASSEDSYPVPGKVRKQFNSISRDNVQNTDHLSSMFQSRRLHDELSHGDLVYFRHDEKRKVTDIAYVRVSRTVDDRPMGKRFKNESLRPCNHVCVEGCDECPDRCKELEDYFSPHPEGLCPACHLFGTTDYKGRVSFGLGWHESNTPKWYMPEDNSQKGSHLTLPLLERPRPTWSMPNKKSEIPGRKFYVHHPWSVDKIRNRQFDPAKEKQPDDVIKPNENNRTVEPLGKGNEFTFEVRFNNLREWELGLLLYSLELEDNMAHKLGMGKALGMGSARIKAEAIELRCESAGQNAELKDKAAFVRKGFEFLEIDKPGENDPMNFDHIRQLRELLWFLPENVSANVRYPMLEKEDDGTPGYTDFIKQEEPSTGKRNPSYLSSEKRRNILQTPWKHWYLIPPFQASAQSETVFEGTVKWFDDKKGFGFIKINDGGKDVFVHHSSIVGTGFKSLNEGDSVAFKMGVGPKGPCAEKVKKIGN

SEQ ID NO: 10 - protein, 1322 aa, Unknown
  source: /note="Description of Unknown: Syntrophorhabdaceae bacterium PtaU1.Bin034 sequence"
MRRQRLLGDAEYYGGTGREQPASIVISTDSDPDHKVYEWIITGQLKAETGFFFGTKAGAGGHTDLSILLGKDGHYRVPRSVFRGALRRDLRVAFGAGCRVEVGRERPCECPVCKVMRQITVMDTISSYREAPEIRQRIRLNPYTGTVDKGALFDMEVGPEGIEFPFVLRFRGSKSFPSELAAVIGSWTKGTAWLGGAAATGKGRFSLLGLSIHKWNLSTAEGRKSYLAAYGLRDAADKTVKRLSIDKGGKGDVGLPAGLERDALPSSVREPLWKKLVCTVDFSSPLLLADPIAALLGVEGDERIGFDNIAYEKRRYNGETNTTESIPAVKGETFRGIVRTALGKRHGNLTRDHEDCRCRLCAVFGKEQEAGKIRFEDLMPVGAWTRKHLDHVAIDRFHGGAEENMKFDTYALAASPTNPLRMKGLIWVRSDLFETGHDGPTPPYVKDIIDALADVKRGLYPVGGKTGSGYGWIKDVTIDGLPQGLSLPPAEERVDGVNEVPPYNYSAPPDLPSAAEGEYFFPHVFIKPYDKVDRVSRLTGHDRFRQGRITGRITCTLKTLTPLIIPDSEGIQTDATGHKMCKFFSVAGKPMIPGSEIRGMISSVYEALTNSCFRVFDEEKYLTRRVQPKKGAKSSELVPGIIVWGQNGGLAVQQVKNAYRVPLYDDPAVTSAIPTEAQKNKERWESVPSVNLQGALDWNLTTANIARDNRTFLNSRPEEKDAILSGTKPISFELEGTNPNDMLVRLVPDGVDGAHSGYLKFTGLNMVLKANKKTSRKLAPSEEDVRTLAILHNDFDSRRDWRRPPNSQRYFPRSVLRFSLERSTYTIPKRCERVFEGTCGEPYSVPSDVERQYNSIIDDISKNYGRISETYLTKTANRKLTVGDLVYFIADLDKNMATHILPVFISRISDEKPLGELLPFSGKLIPCEGEPPTILKKMAPSLLTEAWRTLISTHLEGFCPACRLFGTTSYKGRIRFGFAEHTGTPKWLREELDWARPFLTLPIQERPRPTWSVPDDKSEVPGRKFYLHHHGGNRIVESNLRNRPEVNQTKNNSSVEPISAGNTFTFDVCFENLEAWELGLLLYCLELSPKLAHKLGRAKAFGFGSVKIHVERIEERTTDGAYQDVTAVKKNGWITTGHDKLREWFHRDDWEDVDHIRNLRTVLRFPDADQEHDVRYPELKANNGVSGYVELRDKMTASERQESLRTPWYRWFPQNGTGGSGRHEQAATSQEQDTAKDESVLSATQRRQAVIDVSDPDERLSGTVESFDRQKGDGYIGCGVRQFYVRLEDIRSRTALCEGQVVTFRARKEWEGHEAYDVEIDQ

SEQ ID NO: 11 - protein, 476 aa, Unknown
  source: /note="Description of Unknown: Deltaproteobacteria bacterium sequence"
MLEKALADFRDGVVSLGGLGAIGYGRIGDFEVAEESGTWLKIPEKKLPEDSVQCGERYRFSSDPATRFEKEKIYYPHYFLKPSDEDVRRETRLVSHVYQEDTDGKTRLLTGTIRCRLTTEGPIFIPDTDDPKEDYFQMEIEGHKSYGFFRINEQVAIPGSSIRGMVSSVFEALTNSCFRVFDQKRYLSRSTKPDPRELEKYLPGKVKRIDNKWVLLELEDIFRLPLYDLKDVGPKSLDSAYGLEKFKNEKRFRLKKIENAVAFNKKMAGYAKHTREFLKNNYTETELGKILRGEMKVWFTIGHKPNSAHDNDKIALLTKKTNKRAKSGFIKFTGPSMVNIKADASNSDCEECRFDMKSEDKDGLIFHNAIECRPSQKKEYPRPVLKCVKEAVEYTMIKRCEQVFSEGKKPPRSYSIPDKSRRQYNGILKDNRDNTEHIPSFFRNRMKNKELSDEDLVYFRYKGKKVTNIAPVRVSR

SEQ ID NO: 12 - protein, 437 aa, Unknown
  source: /note="Description of Unknown: Deltaproteobacteria bacterium sequence"
QYNLPLNPDAFPKFRWIVTGHLRAETPFFFGRGEIKDRTIEEETEQTSKTILLNKDNFFRLPRSVIRGALRRDLRLVIGNGCNTPVGGKFCECDVCRIMRHVVVEDTISSCRKPPEIRYNIRLNGHTRTVEEGALFDTETGYQGMRFPFRLCFETRASEFDPDTSEPIPKFDPYLSEVMKHWKAGQAVFGGDTGAGFGRFRLEGDIRFFSMDVAKKEEYDPYLLARGFKGMSSQEILEKIGSGRTYDWNSVPKIALNIPPNKLPWKEICYTIEVISPLISRDPIRAMMDPRNTDTIMIRKRVFVPDGKGGTLPEPESRYFIKSETLRGILRSLVGGNKTADGEYLCDLDHEDCDCVQCRLFGSIHQQGCLRFEDAEVWNSVRDKKMDHVAIDRFTGGALDQMKFDDYPLLGCPEYPVILGGRFWIRDDISDKEKEIA

SEQ ID NO: 13 - protein, 350 aa, Unknown
  source: /note="Description of Unknown: Syntrophorhabdaceae bacterium PtaU1.Bin034 sequence"
MESIPVTLTFLEPYRVVEWYANEDRRSAERYLRGQSFARWHRKKNDKKGRPYITGTLLRSAAIRAAEELLSLSGGVWDGQHCCKGQFLSGGVKPEYMRKRPTYIWAEKEGACSAPDYCPFCIFLGDRDQAEKKAESQNGYPDKSYHIRFGNLSLPDPPPLLDLKEVAVERTLNRVDFQTAKAHDYFKVWEISHEDLGVYTGQIVIHYTGPWQEKVKSLLEGSLRFVDRLCGALCKIEMAPKPARPLPKSLSVDMTEHAKIIVTAFDDAKKAEKVRGLADAMRSMGSKGPTILDKLPAGHDDRDHHTWDVTIVDKTPLRTYLKGVLRADDAASWPALCKALGNALYDVSQG

SEQ ID NO: 14 - protein, 348 aa, Unknown
  source: /note="Description of Unknown: Nitrospirae bacterium sequence"
EKQGFRDKGFNIVGSLKDAIGKEIGLREISLRPAKEETMPRWQCVEYTIIVNSPLHTADPIEALLHSGNYDSVVYKKTVVRNGNIKQIPVFKGETIRGIVRTAFARILRTENVEFDEEHEDCTCPLCQVFGNEHRAGRVRFEDLVIEGYTSEKKFDHVSIDRFTGGAAEKRKFDDLSLKGSPRRPIVLRGKVWIRNDMDSKGIEKLKQAFMDIRDGLYPLGSRGGIGYGWVTDLKIENTEVEEFRLDKVSTTEGSGPATEEFNFPSLPEIQLNKDAVYHPHYFIRPHEKVNREIRPVGHERFHDDLLTGRIKCTLKTLTPLIIPDTEDPDAFGLQAEHKGHQNFRFFR

SEQ ID NO: 15 - protein, 1528 aa, Unknown
  source: /note="Description of Unknown: Hydrothermal vent sediment bacterial communities from Southern Trench, Guaymas Basin, Mexico - 4870-07-3-4_MG sequence"
MKSIPITLTFLEPYRILPWAEKGKRDKKEYLRGANYVRLHKDKNGKFKPYITGTLIRSAVLSAIEMLLDITNGEWNGKECCLAKFHTEGEKPSFLRKKPIYIRAEKDEICTSRETACPLCLILGRFDKAEKKEKDKEKFDVHFSNLNLYSSKEFSTIEELAPKRALNRIEQYTGKAQDYFTVYEALNKEFWTFKGRIRIKEDIYDKVTDLLFSALRCVEKIAGALCRIEIDKEPSQQKGFVKRQLSKQAKEDIEKIFQVVKDAQKLRLLSDCFRELTRMANKDELALPLGPEDDGHYLWDKIKVEGKTLRIFLRNCFSQYKDNWLCFCDEASKKGYQKYREKRHKLTDRELPTATPKHFAEKKDPQISPIYIDKDDKVYEWIIVGRLIAQTPFHFGDEEKAEGAILLTPDNRFRLPRTALRGILRRDLKLAGASACEVEVGRSEPCPCDVCKIMRRVTLLDTVSEDLRDFLPELRKRIRINPQSGTVAEGALFDTEVGPEGLSFPFVLRYKCEKLPDSLTTVLCWWQEGLAFLSGESATGKGRFRLEINGAFVWDLQKGLFNYIKNHGFRGEERLFLEGNEAELEKMGIQINTELLQPEMIKKEKNFTDFPYDLIKYQLNISSPLLLNDPIRAIALYEGEGKAPDAVFFKKYVFENGKIEEKPCFKAESIRGIFRTAVGRIKNVLTKNHEDCICVLCHLFGNVHETGRLKFEDLKIVSGQEEKFFDHVAIDRFLGGAKEKYKFDDKPIIGAPDTPIVLEGKIWVKKDINDEAKETLSQAFSDINTGIYYLGANGSIGYGWIEEVKALKAPSWLKIKEKPNFEKDTSLNISAIMNEFKKDIQTLNLDKTYLPYGFLKLLEKVKRTSSPITHERFYENHLTGFIECSLKVLSPLIIPDTETPEKEENGHKYYHFLKIDNKPIIPGAEIRGAVSSIYEALTNSCFRVFGEKKVLSWRMEGKDAKEFMPGRVSKKKGKLYMVKMQALRLPVYDNPALANEIRSGSIYEKYKNSKVEIIFFQTVEGIRKFLRGNFNNVEWKKVLVTGIDPLAILPSQKIPGNDKWVKNLQSKISPVRGYFKFTGPNKIETKRREEEKDEKLRTKANKVSCLQKDKWYEAMHNHVEYKQDYTPPNSPKTEPLERPRNIPCFVCSDKEKIYRMTKRCERVFVSLGENAPKYEIPISAIKRYEVILSAYRENWERNKTPELFRTRLPGDGRTLNEDDLVYFRADENEKVKDIIPVCISRIVDEVPLIKRLSQELWPCVLAECPLLGFECKKCELEGLPEKIWFRINKDGLCPACRLFGTQIYKSRVRFSFAYAKNWKFYDGYITLPRLESPRATWLILKEKDKHYIKYKVCGRKFYLHNSTYEDIINNSKKEKEKKTENNASFEVLKEGEFTFKVYFENLENWELGLLLLSLTGLGEAIKIGHAKPLGFGSVKIEAKKIYFREEAGKFHPCEKADEYLKKGLNKLTSWFGKNEINEHMRNLLLFMTYYQNLPKVKYPDFDGYAKWRCSYVEQDKVEYFQNRWIVAS

SEQ ID NO: 16 - protein, 1652 aa, Unknown
  source: /note="Description of Unknown: Sorted cell/s from Southern Trench hydrothermal vent microbial mat, Guaymas Basin, Mexico - 6X_4868_18_01 sequence"
MIINITVKFLGPFRMLEWTDPDNRNRKNREFMRGQAFARWHNSNPQKGSQPYITGTLVRSAVIRSAENLLMLSEGKVGKEKCCPGEFRTENRKKRDAMLHLRQRSTLQWKTDKPLCNGKSLCPICELLGRRIGKTDEVKKKGDFRIHFGNLTPLNRYDDPSDIGTQRTLNRVDYATGKAHDFFKVWEIDHSLLSVFQGKISIADNIGDGATKLLEDSLRFTDRLCGAICVISYDCIENSDGKENGKTGEAAHIMGESDAGKTDAENIANAIADMMGTAGEPEKLRILADAVRALRIGKNTVSQLPLDHEGKENHHLWDIGEGKSIRELLLEKAESLPSDQWRKFCEDVGEILYLKSKDPTGGLTVSQRILGDEAFWSKADRQLNPSAVSIPVTTETLICGKLISETPFFFGTEIEDAKHTNLKVLLDRQNRYRLPRSAIRGVLRRDLRTAFGGKGCNVELGGRPCLCDVCRIMRGITIMDARSEYAEPPEIRHRIRLNPYTGTVAEGALFDMELGPQGLSFDFILRYRGKGKSIPKALRNVLKWWTKGQAFLSGAASTGKGIFRLDDLKYISFDLSDKDKRKDYLDNYGWRNRIEALSLEKMPLDRMNDYAEPLWQKVSVEIEIGSPFLNGDPIRALIEKDGSDIVSFRKYADDSGKEVYAYKAESFRGVVRAALARQHFDKEGKPLDKEGKPLLTLIHQDCECLICRLFGSEHETGRLRFEDLLFDPQPEPMIFDHVAIDRFTGGAVDKKKFDDCSLPGTPGHPLTLKGCFWIRKELEKPDEDKSEREALSKALADIHNGLYPLGGKGAIGYGQVMNLKIKGAGDVIKAALQSESSRMSASEPEHKKPDSGLKLSFDDKKAVYYPHYFLKPAAEEVNRKPIPTGHETLNSGLLTGKIRCRLTTRTPLIVPDTSNDDFFQTGVEGHESYAFFSVNGDIMLPGSEIRGMLSSVYEALTNSCFRVFDEGYRLSWRMEADRNVLMQFKPGRVTDNGLRIEEMKEYRYPFYDRDCSDKKSQEAYFDEWERSITLTDDSLEKMAERKGDISPKDLKVLKSLKGKNYKSTEGLLAAFKDKGGDTGGNILGLIFKYAERIGDVPRYEHPTDTDRMMLSLSEYNRNQKSDGKRAYKIIKPASKLGKGAYFMFAGTSVENKRICNPACTDKANKSVKGYLKISGPNKLEKYNISEPELDGVPEDRNCQIIHNRIYLRKIFVANAKKRKERDRLVGEFACYDPEKKVTYSMTKRCERIFIKDRGRTLPITHEASELFEILVQEYRENAKRQDTPEVFQTLLPDNGRLNPGDLVYFREEKGKTVEIIPVRISRKIDDSPIGKRLREDLRPCHGEWIEGDDLSQLSEYPEKKLFTRNTEGLCPACRLFGTGAYKGRLRFGFAKLENDPKWLMKNSDGPSHGGPLTLPLLERPRPTWSMPDDTLNRLKKDGKQEPKKQKGKKGPQVPGRKFYVHHDGWKEINCGCHPTTKENIVQNQNNRTVEPLDKGNTFSFEICFENLEPYELGLLLYTLELEKGLAHKLGMAKPMGFGSIDIEVENVSLRTDSGQWKDANEQISEWTDKGKKDAGKWFKTDWEAAEHIKNLKKLLFLPGEEQNPRVIYPALKQKDIPNSRLPGYEELKKNLNMEKRKEMLTTPWAPWHPIKK

SEQ ID NO: 17 - protein, 1723 aa, Unknown
  source: /note="Description of Unknown: Hydrothermal vent microbial mat bacterial communities from Southern Trench, Guaymas Basin, Mexico - 4869-18-0-1_MG sequence"
MTQITIQVTFFHPFRVVPWNHRDHRKTDRKYLRGGTFAKWHCTASEGKSGRPYITGTLLRSALFAEIEKLIAFHDPFKCCRGKDKTENGNAKPLFLRRRPRADCDPCGTCPLCLLMGRSDTVRRDAKKQKKDWSVHFCNLREATERSFNWKETAIERIVNRVDPSSGKAKDYMRIWEIDPLVCSQFNGIITINLDTDNAGKVKLLMAAGLAQINILAGSICRADIISEDHDALIKQFMAIDVREPEVSTSFPLQDDELNNAPAGCGDDEISTDQPVGHNLVDRVRISKIAESIEDVFSQEQKAQQLRRMADAIRDLRRSKPDETTLDALPKGKTDKDNSVWDKPLKKDILPSPRMPASEDDDTPTLRKVLKDEINGQEDMWRKFCEALGNSLYDLSKKAKERKRTEALPRLLGETEIYGLPMRENKEDEPLPSSLTYKFKWLIAGELRAETPFFFGTEVQEGQTSATILLNRDGYFRLPRSVIRGALRRDLRLVMGNDGCNMPIGGQMCECGVCRVMRHIVIEDGLSDCKIPPEVRHRIRLNCHTGTVEEGALFDMETGYQGMTFPFRLYCETENSDLDSYLWEVLNNWQNGQSLFGGDTGTGFGRFELTEPKVFLWNFSKKEKHEAYLLNRGFKGQMPVQDVKTKSFKTKTWFQIHRELDISPKKLPWYSTDYRFNVTSPLISRDPIGAMLDPRNTDAIMVRKTVFCPDPNAKNRPAPATVYMIKGESIRGILRSIVVRNEELYDTDHEDCDCILCRLFGSIHQQGSLRFEDAEVQNSVSDKKMDHVAIDRFTGGGVDQMKFDDYPLPGCPAQPLILEGKFWVKDDIDDESKSALEKAFADFRDGLVSLGGLGAIGYGQIGDFELIGGSADWLNLPKPEENRTDVPCGDRSAQGPEIKISLDADKIYHPHFFLKPSDKNVYRERELVSHAKKKGPDGKSLFTGKITCRLSTEGPVFIPDTDLGEDYFEMQASHKKHKNYGFFRINGNVAIPGSSIRGMISSVFEALTNSCFRVFDQERYLSRSEKPDPTELTKYYPGKVKRDGNKFFILKMKDFFRLPLYDFDFEGEAESLRPNYDEDRNEEENKGKNKNTQKVKNAVEFNIKMAGFAKHNRDFLKKYKEQEIKDIFMGKKKVYFTAGKHKPNEAHDNDKIALLTKGSNKKAEKGYFKFTGPGMVNVKAGVEGEECDFHIDESDPDVYWNMSSILPHNQIKWRPSQKKEYPRPVLKCVKDGTEYVMLKRSEHVFAEASSEDSYPVPGKVRKQFNSISRDNVQNTDHLSSMFQSRRLHDELSHGDLVYFRHDEKRKVTDIAYVRVSRTVDDRPMGKRFKNESLRPCNHVCVEGCDECPDRCKELEDYFSPHPEGLCPACHLFGTTDYKGRVSFGLGWHESNTPKWYMPEDNSQKGSHLTLPLLERPRPTWSMPNKKSEIPGRKFYVHHPWSVDKIRNRQFDPAKEKQPDDVIKPNENNRTVEPLGKGNEFTFEVRFNNLREWELGLLLYSLELEDNMAHKLGMGKALGMGSARIKAEAIELRCESAGQNAELKDKAAFVRKGFEFLEIDKPGENDPMNFDHIRQLRELLWFLPENVSANVRYPMLEKEDDGTPGYTDFIKQEEPSTGKRNPSYLSSEKRRNILQTPWKHWYLIPPFQASAQSETVFEGTVKWFDDKKGFGFIKINDGGKDVFVHHSSIVGTGFKSLNEGDSVAFKMGVGPKGPCAEKVKKIGN

SEQ ID NO: 18 - protein, 1548 aa, Unknown
  source: /note="Description of Unknown: Hydrothermal sediment microbial communities from Guaymas Basin, California, USA 4484. Combined assembly of Gp0115313 and Gp0146561 sequence"
MTKIPISLTFLEPFRLVDWVSESERDKSEFLRGLSFARWHRIKNQREDENQGRPYITGTLLRSAVIKAAEELIFLNGGKWQSEECCNGQFKGSKAKYRKVECPRRRHRATLKWTDNTCSDYHNACPFCLLLGCLKPNSKENSDIHFSNLSLPNKQIFKNPPEIGIRRILNRVDFTTGKAQDYFYVWEVEHSMCPKFQGTVKINEDMPKYNVVKDLLISSIQFVDKLCGALCVIEIGKTKNYICQSFSSNIPEEEIKKLAQEIRDILKGEDALDKMRVLADTVLQMRTKGPEIVNELPRGIEKKGGHWLWDKLRLRKKFKEIANNYKDSWQELCEKLGNELYISYKELTGGIAVKKRIIGETEYRKIPEQEISFLPSKAGYSYEWIILGKLISENPFFFGKETKTEEQIDMQILLTKDGRYRLPRSVLRGALRRDLRLVIGSGCDVELGSKRPCPCPVCRIMRRVTLKDARSDYCKPPEVRKRIRINPLTGTVQKGALFTMEVAPEGISFPFQLRFRGEDKFHDALQNVLVWWKEGKLFLGGGASTGKGRFKLEIEHVLKWDLKNNFHSYLQYKGLRDKGDFNSIKEIEGLKVETEEFKVKKPFPWSCVEYTIFIESPFVSGDPVEAVLDSSNTDLVTFKKYKLEESKEVFAIKGESIRGVFRTAVGKNEGKLTTENEHEDCTCILCRLFGNEHETGKVRFEDLELINDSAPKRLDHVAIDRFTGGAKEQAKFDDSPLIGSPDSPLEFTGIVWVRDDIDEEEKKALKSAFLDIKSGYYPLGGKKGVGYGWVSNLKIESGPEWLRLEVQEKSSQENVLSPVILSEVMDIEFNPPKIDENGVYFPYAFLRPLNEVKRTREPIGHNEWKKSLISGYLTCRLELLTPLIIPDTSEEVIKEKVNNGEHPVYKFFRLGGHLCIPAAEIRGMISSVYEALTNSCFRVFDEKRLISWRMTAEEAKRPDPKKSEEQNRMRFRPGRIIKKDKKFYAQEMLELRIPVYDNKDKRNEISQNDPTRPSEYNHPTEPERIFFSNAEKIRNFLKRNSNYLHGSTPLLFRQWSISNRYDKIALIGNKSQGHLKFTGPNKIEVSEGTKCPKYETIPGRDEWDKAVHNYVEPGKFVTVISRKKGQKPKAVQRRRNVPAFCCYDYNTNRCFVMNKRCERVFKVSRDKPKYEIPPDAIRRYEHVLRKYRENWERYDIPEVFRTRLPGDGETLNEGDLVYFRLDENNRVLDIIPVSISRISDTQYLGRRLPDHLRSCVRECLYEGWGDCKPCKLSLFPEKMWIRINPEGLCPACHLFGTQVYKGRVRFGFARAGSNWKFREEQLTLPRFETPRPTWVIPKRKDEYQIPGRKFYLHHNGWEEIYKKNKKNEIKKEKNNATFEVLKQGTFYFKVFFENLELWELGLLIFSAELGGEEFAHKLGHGKALGFGSVKISVDKIILRRDPGQFEQRGQKFKRDAVDKGFCVLENRFGKTNFKIYLNNFLQLLYWPNNKKVKVRYPYLRQEDDPEKLPGYVELKKHQMLKDDNRYSLFARPRAVWLKWTEMVQRDKS

SEQ ID NO: 19 - protein, 1720 aa, Unknown
  source: /note="Description of Unknown: Hydrocarbon resource environments microbial communities from Canada and USA sequence"
MSVEEFYVRLTFLEPFRVVPWVRNGDERKGDRIYQRGGTYARWHKINDSHGQPYITGTMLRSAVLREIENTLTLHNTYGCCPGGTRTTEGKLEKPLYLRRRDGFEFENHAEKPCSEEDPCPLCLIQGRFDKLRRDEKKQFVRQGNISFCSVNFSNLNISSGIKSFSWEEIAVSRVVNRVDPNSGKAKDFFRVWEIDHKLCPNFLGKMSISLSEKLEDVKALLAVGLAQVNVLSGALCRVDIIDPETQKDTVHQHLIQQFVTRIQDKEKGDAADIPAFTLPPAGLSPSSNEWNDTIKSLAEKIRKIKELEQGQKLRQMADVIRELRRKTPAYLDQLPAGKPEGRESIWEKTPTGETLTLRQLLKSANVPGESWRAFCEELGEQLYRLEKNLYSHARPLPRLLGETEFYGQPARKSDDPPMIRASYRAFPSYVWVLDGILRAETPFYFGTETSEGQTSQAIILCPDGSYRLPRSLLRGVIRRDLRAILGTGCNVSLGKVRPCSCPVCEIMRRITVQQGVSSYREPAEVRQRIRSNPHTGTVEEGALFDLETGPQGMTFPFRLYFRTRSPYIDRALWLTINHWQEGKAIFGGDIGVGMGRFRLENLQIRSADLVSRRDFSLYLRARGLKGLSREEVTRIGLNEEQWEAVMADDPGTHYNPFPWEKISYTLLIHSPLISNDPIAAMLDHDNKDAVMVQKTVLFVDESGNYSQMPHHFLKGSGIRGACRFLLGRKDAPNENGLTYFEADHEECDCLLCSLFGSKHYQGKLRFEDAELQDEVEAIKCDHVAIDRFHGGTVHRMKYDDYPLPGSPNRPLRIKGNIWVKRDLSDTEKEAVKDVLTELRDGLIPLGANGGAGYGRIQRLMIDDGPGWLALPERKEDERPQPSFSPVSLGPVHVNLKSGSDTADVYYYHPHYFLEPPSQTVSRELDIISHARTRDSGGEALLTGRILCRLITRGPIFIPDTNNDNAFGLEGGIGHKNYRFFRINDELAIPGSELRGMVSSVYEALTNSCFRIMEEGRYLSRRMGADEFKDFHPGIVVDGAKIREMKRYRLPLYDTPDKTSRTKEMTCPELFTRKDGRPERAKKFNEEIAKVAVQNRAYLLSLDEKERREVLLGNREVTFDECPDDEYSDDEYSELKYAQKYKDFIAVLKKNGQKRGYIKFTGPNTANKKNEDAPDKNYRSDWDPFKLNILLESDPECRVSNIHCYPRPLLVCIKDKAEYRIHKRCEAIFCSIGSPSDLYDIPQKVSNQYRTILQDYNDNTGKIVEIFRTQIKHDQLTTGDLVYFKPAANGQVNAVIPVSISRKTDENPLAKRFKNDSLRPCAGLCVEDCNECPARCKKVADYFNPHPRGLCPACHLFGTTFYKGRVRFGFAWLTGEDGAPRWYKGPDPCDSGKGRPMTIPLLERPRPTWSIPDNSFDIPGRKFYVHHPYSVDGIDGETRTPNNRTIEPLAEGNEFVFDIDFENLRDWELGLLLYSLELEDSLAHKLGLGKPLGFGTVQINIRGISLKNGSKGWDTKTGDDKNQWIKKGFAHLGIDIKEANERPYIKQLRELLWVPTGDNLPHVRYPELESKTKDVPGYTSLLKEKDLADRVSLLKAPWKPWKPWSGTAPHPDKGTNRLRASIVERDRIQRKTDTAKPEKKEETKVGKSSSSDIEKRYVGTVKWFNDKKGYGFILYGTDEEIFVHRSGVADNSIPKEGQKVGFRIERGARGSHAVEVKAIE

SEQ ID NO: 20 - protein, 1610 aa, Unknown
  source: /note="Description of Unknown: Freshwater metagenome sequence"
MPRFQLSLTFFDEPFRLIEWTDKSNRNSANTQWMRGQGFARWHKITLEKGFPFVTGTAVRSKIIREVEALLSRNKGTWNGIPCCSGFFDTKGPSPTHLRYRPTLEWEYGKTVCTSEADVCPLCLLLGRFDQAGKKSDTPCQSTDYHVHWENLSAGVAQYRLEDIAQKRTSNRVDFFSKKAHDHYGVWEVTAVKNLLGYIYISDAITESHQKTVISLLKAALSFTDTLCGANCKLELSDEPVDSIHSNQSASNFNPHSGAAPSQCSQSMPPFNMDQETKELANTLCKAFTGNMRHLRTLADAVREMRRMSPGISSLPRGRLNKEGEITAHYLWDERIDEKTIRQVLEDTIELSPARSIIYKNWISFCNQLGQKLYERAKDNDPILERKRPLGEAAFSKVPTSSHAPRHDMNSRVKGGFTREWIIVGTLRALTPFYMGTGSQAGKQTSMPTLQDSNDHFRLPRTALRGALRRDINQASDGMGCVVELGPHNLCSCPVCQVLRQIRLLDTKSKFSMPPAIRQKICKNPVLSIVNEGSLFDVELGIEGETFPFVMRYRGGAKIPDTIITVLSWWKNERLFIGGESGTGRGRFVLECPRIFCWDVEKGQNDYIQYHGFRNKEDELLSVYSTVSGLAEKNDVNLNNARDFSFDKICWEVQFDGPVLTGDPLAALFHGNTDSVFYKKPILKSGEKEPSYQWAIKSDTVRGLIRSAFGKRDALLIKSHEDCDCLLCEAFGSKHHEGKLRFEDLTPKSDEIKTYRMDHVAIDRISGGAVDQCKYDDEPLVGTSKHPLVFKGMFWINRDSSVEMQRALIAAFKEIRDGLYPLGSNGGTGYGWISHLAITNGPDWLNLEEVPLPQPTADIPVEECTAEPYPKFQKPDLDQNAVYYPHYFLQPGKPAERERHPVSHDHIDDKLLTGRLVCTLTTKTPLIIPDTQTNTMLPPNDAPEGHKSFRFFRIDDEVLIPGSEIRGMVSTVFEALTGSCFRVINQKAHLSWRINADMAKHYRPGRIIQNNEKMFIQPYKMFRLPFYAGFDPRNCLSEKQLLGIEPVKLWVKDFVASLVKPQTDIDIEWKEKIGFVRVTGPNKVEVDSSNTPDPSLPECESDWKDIHITEDGSTPSKNDRVYRCQLKGVTYTVAKWCEAFWVKDEGKKPITVNAEAINRYHLIMKSYQDNPQSPPIIFRSLPVLNYKQDQKIIGSMIFYRESAKSDKIVNEIIPVKISRTADTELLAKHLPNNDFLPCAATCLNECDTCNAKTCKFLPLYREGYPVNGLCPSCHLFGTTGYQGRVRFGFAKMNGNAKFCQGGERPEDRAVTLPLQERPKLTWVMPNENSTIPGRKFFLHHQGWKKIVDEGKNPINGDVIEPDANNRTVEPLAAGNDFSFEVFFENLREWELGLLRYTLELESELAHKLGMGKAFGFGSVKIKIKSVDLRKQGEWEKATNTLVSEDKKSSWYNIHTVNNLRTALYYVEDDKIQVNYPKLKKDNESDNRPGYVEMKKTAFPVRDILTTPWWPWWPPTPPPMNQSGNQSYARSEEPARITESQPEVYKTGTVKFYKHDKKFGFITMDGRENIHFAGNQICRPETSLQSGDKVKFIEGENYKGPTALKVERLKG

SEQ ID NO: 21 - protein, 1575 aa, Unknown
  source: /note="Description of Unknown: soil metagenome sequence"
MRLKINIHFLEPFRLIEWHEQDRRNKGNSRWQRGQSFARWHRRKDNDQGRPYITGTLLRSVVIRAVEEELARPDTAWQSCGGLFITPDGQTKPQHLRHRATVRARQTAKDKCADRQSACPFCLLLGRFDQVGKDGDKKGEGLRFDVRFSNLDLPKDFSPRDFDGPQEIGSRRTINRVDDETGKAHDFFSIWEVDAVREFQGEIVLAADLPSRDQVESLLHHALGFVDRLCGARCVISIADQKPAEREERTVAAGDEKATIADYDQVKGLPYTRLRPLADAVRNLRQLDLAELNKPDGKFLPPGRVNKDGRRVPHYVWDIPLGKGDTLRKRLEFLAASCEGDQAKWRNICESEGQALYEKSKKLKDSPAAPGRHLGAAEQVRPPQPPVSYSEESINSDLPLAEWIITGTLRAETPFAIGMDAPIDDDQTSSRTLVDRDGRYRLPRSTLRGILRRDLSLASGDQGCQVRLGPERPCTCPVCLILRQVVIADTVSETTVPADIRQRIRRNPITGTAADGGLFDTERGPKGAGFPFSLRYRGHAPMPKALRTVLQWWSAGKCFAGSDGGVGCGRFALDNLEVYRWDLGTFAFRQAYSENNGLRSPEEEFDLAVIHELAEGLAKEDGQKILKGTEPFTCWQERSWQFSFTGPLLQGDPLAALNSDTADIISFRRTVVDNGEVLREPVLRGEGLRGLLRTAVGRVAGDDLLTRSHQDCKCEICQLFGSEHRAGILRFEDLPPVSPTTVADKRLDHVAIDRFDQSVVEKYDDRPLVGSPKQPLVFKGCFWVQTSGMTHQLTELLAQAWRDIAAGHYPVGGKGGIGYGWINSLVVDGEKITCRPDGDSISLTTVTGDIPPRPALTPPAGAIYYPHYFLPPNPEHKPKRSDKIIGHHTFATDPDSFTGRITCKLEVVTPLIVPDTEGEQPKDQHKNFPFFKINDEIMLPGAPLWAAVSQVYEALTNSCFRVMKQKRFLSWRMEAEDYKDFYPGRVLDGGKQIKKMGDKAIRMPLYDDSTATGSIKDDQLISDCCPKSDEKLQKALATNQKIALAAKHNQEYLAQLSPDEREEALQGLKKVSFWTESLANNEAPPFLIAKLGEERGKPKRAGYLKITGPNNANIANTNNPDDGGYIPSWKDQFDYSFRLLGPPRCLPNTKGNREYPRPGFTCVIDGKEYSLTKRCERIFEDISGGENQVVRAVTERVREQYREILASYRANAAGIAEGFRTRMYDTEELRENDLVYFKTAKQADGKERVVAISPVCISREADDRPLGKRLPAGFQPCSHVCLEDCNTCSAKNCPVPLYREGWPVNGLCPACRLFGAQMYKGRVNFGFARLPDDKQPETKTLTLPLLERPRPTWVLPKSVKGSNTEDATIPGRKFYLRHDGWRIVMAGTNPITGESIEKTANNATVEAIMPGATFTFDIVCENLDQQELGLLLYSLELEEGMSHTLGRGKPLGFGNVRIKVEKIEKRLSDGSRREMIPPKGAGLFMTDKVQDALRGLTEGGDWHQRPHISGLRRLLTRYPEIKARYPKLSQGEDKEPGYIELKSQKDENGVPIYNPNRELRVSENGPLPWFLLAKK

SEQ ID NO: 22 - protein, 1237 aa, Unknown
  source: /note="Description of Unknown: groundwater metagenome sequence"
MSNQTRWIIEGTLELITPLHIGTGLDEKERDENKETRWLEAVALDHKGQPYIPGASLKGALRALAKRHDFRNLFDNKEVDGDFVRQAEFLSAWCVPDTDKGRLIQPRVAIDRVTGTAQDKKLFQTRLITPGTRFAMKIVVQNAVENEIADLLGLLNLLPDDPQFSLGAYANQGQGRVQWFGKIQTRCFGINEAKAWYEEIRKDESKCWTAFAKPKNVSTPPTPAKEAQLTLPLNLAFHTPFLVKQAGIKADDADAVPRRTHDDKIVLPASSLRGRLRTQSERILRTLGCETPQGHTAPAYRKGQPHDDLAVLLFGAAGWRGIVQTSDCIVEDKSIKTRRHEMLAIDRFTGGGKDGAKFNVDYVECPTLAGKLSLDLARLKNAKLKGGKDALLPALGLMTLMLRDLAEGDIPFGYGISKGYGQCRASSALGDWAELLKQHLGADSADTTVQALREYLGNPKGQELKLDPPSADATQAGVPAQQNAAKTQAQGAQEKFHNPYHFIPLSKPDISQWPEPQKLTEKGHSHDRYASLSGRIVCRLTTQTPLFIGSEQTTPTNPQAPKSLHPFKLNNGLAIPATSLRGMISSLFESVSNSNFRVLDEKTYSMRKTMQQSLSAMGRIVRHDQKLYLLPLTLPTLPQGPHGVYDLGEKWSAVFDWQPPPLRIYFDPPPRRTYQSQQPCYMKLSTVKYSESNPNQIIAGENLGALRFPRGNQNTQFLIGQSNQDECPITQAEYAQKSEDERNEYTSGWVRTLVKPGRDLPRSVKHHVFLPDVFIDAPPPVNDLYPIPDSVIQRFHDLADQVLASMNLKPEEIVDSTNLLPYTPVGRRSDSDCRDTRLQAGDLIFFDIDPPLHPGEKSQITEISFSSIWRSGIGKDHLLTTPDLLTNFDVNLQPHGMPGRTQSLSPAELLFGLVGTQNDQATTAYAGKVRIGFGLPEEGHNPRLDARITLKELSSPKPPSPALYFRKKSGKDEYVSKANLADKPEDYILRGRKMYLHAWRKNEQVVELSDTGHDGGVRPPWVSKFDESADEGNKRRVSIEPIAKDESFYFEVDFHNLSRTELAQLCATLYPNEKFEHRLGMGKPLGLGSIKITPLSLFLVNRSQRYATDGLDKPRYHAVWHTGTASEPRWPDHLQREQQGIAFEGVSTAPTVMSLAAEAKVSDDVKRALELLGNPDEITVPVHYPQLHNGLMESKQFDWFVQNDKSGRDQPANNRQHLSSFTKDTEKLEPLIRIMRR

SEQ ID NO: 23 - protein, 1291 aa, Unknown
  source: /note="Description of Unknown: wastewater metagenome sequence"
MTTPSAPKSSLPALHWLIRAELEVLTPLHLGTGTDQRITPDAPDADPYWQADIALDADGRPYLPGASLKGALKALARRRQVDAPCLPLFGDLNRGGAPHPDCIPPRRTRAGLAEFRDALQSHATQADGPDTAQPRIAIDRITGSVVDKKLFHTQTVPVGTRFSVEIILRRADQNLAAQLVALLQHGPTDPDFRLGAHANLGFGRVGLYGNIDTRRFGPQQAQHWFAAAQTQADARWTDFAEAVTLTAPAPAPAQPAPHRLALPLSLTFHTPFLVKQPEHKHRKPQDNAPDGTPRQRGDRALLPGASLRGRLRSQAERILRTLGCKVAQGHAVPPVKNNTCPDPATLLFGTAGWRGLLRTDDCTGTAPATLVDHDMLAIDRFTGGGKDGAKFKLRYAECPTLEGQLSLDLSRLRSARLDGANAADTPWIALGLLTLVLRDLAEGDIPFGHGSAKGYGRCRAQGLPDRWRQALEAHFGPNADARALAALRAWCRTHATAALDAPCSLAGSAPTPAAAAPSGQAAPADAFHNPYHFIPFSQPDIDRWLSPDAHRKTGGHSRYRGLSGRLVCALTTVTPLFVGAAARTPASDQHPKPVAGFALQNQPAIPATSLRGLLSSLFESISGSNLRVLHPTPYSIRKTTKEALSAIGRIVERNGELKLYPLTLPTIHQNADNAYPVPARWRKVFYWESPVPLRVYFGSRKQTYDSRQPHYLPIQELSYLPNDSDCIAPDQGDLRFPSRDRDRKFLIGQCPISRYDCPIPETDLPKLSPQERPRYTRGWVRSLWTSNREKELPHTVKHQLFIPDPVETPAADDLLPIPQGVLDTFHALADLALAGQHWGKDETPADDQLLPFTPAGRQRHDADRPPRDADRQTRLQPGDLVCFDLGDDGAVSEISFSSIWREGLRLAGKPNLATTADLLAQVSPHLLPLGMPGRSARLSPVEQLFGVVEYRPPQTAKGTRKPTDAPAAYALAGKLQVGFGRPARPFEREPAVTLKELSTPKPPSPALYFRPKAGDGYVSKAKLASQPQDYAPAGRKHYLHALRRQGQVARLDNSGHVPSDGSGRPPWQSRFDGQEDSGNKRRVRVEPIPAGETFHFEIDFDNLSPTELEQLCATLLPHPAFEHRLGMGKPIGLGSVKLAVEGLLLVDRPRRYAEDEPNAPRHHRGWRANADAGWPDHLQGDSPAAPLEATEQPAALAERAMARVPADVRRALQLLGNPGAVAAPVHYPQVKDAQIEEKHYLWFVANDDEKTAGGNRHLPRLHANSPGLPTLPRLVKREKDHSSNTGKPRRK

SEQ ID NO: 24 - protein, 1801 aa, Unknown
  source: /note="Description of Unknown: oral metagenome sequence"
MIPDLRSLVVHISFLTPYRQAPWFPPEKRRNNNRDWLRMQSYARWHKVAPEEGHPFITGTLLRSRVIRAVEEELCLANGIWRGVACCPGEFNSQAKKKPKHLRRRTTLQWYPEGAKSCSKQDGRENACPFCLLLDRFGGEKSEEGRKKNNDYDVHFSNLNPFYPGSSPKVWSGPEEIGRLRTLNRIDRLTTKAQDFFRIYEVDQVRDFFGTITLAGDLPRKVDVEFLLRRGLGFVSTLCGAQCEIKVVDLKKKQNNKEDSILPVSEVPFFLEPEVLAKMCQDVFPSGKLRMLADVILRLREEGPDNLTLPMGSQGLGGRLPHHLWDVPLVSKDRETQTLRSCLEKIAAQCKSEQTQFRLFCQKLGSSLFRINKGVYLAPNSKISPEPCLDPSKTIRTKGPVPGKQKHRFSLLPPFEWIITGTLKAQTPFFIPDEQGSHDHTSRKILLTRDFYYRLPRSLLRGIIRRDLHEATDKGGCRVELAPDVPCTCQVCRLLGRMLLADTTSTTKVAPDMRHRVGVDRSCGIVRDGALFDTEYGIEGVCFPLEIRYRGNKDLEGPIRQLLSWWQQGLLFLGGDFGIGKGRFRLENMKIHRWDLRDESARADYVQKCGLRRGVGDDTAINLEKDLSLNLPESGYPWKKHAWKLSFQVPLLTADPIMAQTRHEEDSVYFQKRIFTSDGRVVLVPALRGEGLRGLLRTAVSRAYGISLINDEHEDCDCPLCKIFGNEHHAGMLRFDDMVPVGTWNDKKIDHVSCSRFDASVVNKFDDRSLVGSPDSPLHFEGTFWLHRDFQNDVEIKTALQDFADGLYSIGGKGGIGYGWLFDMEIPRSLRKLNSGFREASSIQDALLDSAKEIPLSAPLTFTPVKGAVYNPYYYLPFPAEKPERCLVPPSHARLQSDRYTGCLTCELETVSPLLLPDTCREKDGNYKEYPSFRLNNTPMIPGAGLRAAVSQVYEVLTNSCIRIMDQGQTLSWRMSTSEHKDYQPGKITDNGRKIQPMGKQAIRLPLYDEVIHHVSTPGDTDDLEKLKAIVLELTRPWKELPEEQKKKRFEKCKNILDGRMLQQKELRALENSGFAYWRDKTSLTFDSFLKDAIEQEYPRYSGDYQRIKALVVNITLPWKLLKKEERHKRFDKCRRILKGQQPLTKDERKALEESGFANWHGRELLFDRFLKDENSCLIKAETTDRVIASVAKNNRDYLFEIKQQDFARYKRIIQGLERVPFSLRSLAKSKETSFQIACLGLRRGRFLRKGYLKISGPNNANVEISGGSHSNSGYSDIWDDPLDFSFRLSGKSELRPNTQKTREYPRPSFTCTVDGKQYTVNKRCERVFEDSAAPAIELPRMVREGYKGILTDYEQNAKHIPQGFQTRFSSYRELNDGDLVYYKTDSQGRVTDLAPVCLSRLADDRPLGKRLPEEYRPCAHVCLEECDPCTGKDCPVPIYREGYPARGFCPACQLFGTQMYKGRVRFSFGVPVNSTRSPQLKYVTLPSQERPRPTWVLPESCKGKEKDVPGRKFYLRHDGWREMWGDDDKPDSRPSSEECQDIIEGIGPGEKFHFRVAFENLDKNELGRLLYSLELDAGMNHHLGRGKAFGFGQVKIRVTKLERRLEPGQWRSEKICTDLPVTSSELVISSLKKVEERRKLLRLVMTPYKGLTACYPGLERENGRPGYTDLKMLATYDPYRELVVQIGSNQPLRPWYEPGKSFKPSPGNDCTGRGGSVSKSLISEPKVVPAIAPFCEGVVKWFNSVKGFGFIETKEQRDIFVHFSAIRGEGYKILEPGEKVRFEIGEGRKGPQAINVIRIR

SEQ ID NO: 25 - protein, 1322 aa, Unknown
  source: /note="Description of Unknown: hydrothermal vent metagenome sequence"
MKMNKTWPFREHWEISGYLRTVTPLHIGSGRTVTRPELTVADRDELVDINAVVTDYTGKPYLPGSTIKGALHAWLQKRLKEESRTCLIQLFGQEEEAEEKKKNNHGGKAEFFDARVIFPHTGPGSLPYWDDCRQTYVAATVAIDNITRTARHRHLIHAEMVPPGVTFALTLAGPLDEEDIGLLLAALQGFNESPPALVIGAHTANGLGRFSWELSTVRRFGKEHLQGWLEAETRAMRTEAMQPLSREGVEDLLQDGIAQIDHNEDQVRLGLELCFDGPFLVNDPPTKKEQDDKKKRRSNTPNLRPLRDAIGRPCLPESSVRGALRAQAERIIRTMEGTCSEDNPAYKKEIHTDAEIEELSAVCRVFGAPGWKSLLEISDFEFVDGEDCDNIQEFVAIDRFTGGAKDKAKFNAEYIGSPRFTGTIALDKRRDLPDWGKGLLYLVLRDLAEGDITLGFGRSKGYGVCRAKIKNLDLLLPEKSVAALHKKFAISPADDKPATDQIAEDTTSGNLGISAGGPAQKTTESYEPPNPSGPGTFHNPYHFVPVVKPSAADRQHWLDKGILPSASENKTQHTHACYLDTTNGKKIYHGRIVCRLQAETPMFIGGRHRENTEPTEILPFTLGGKPAIPATSLRGMLSSIAEAASNSSLRVLEDKTLSYRKSMRANRNEDKPLSALGMIKKIETGDKVEYRLLPLTLPTLVKRGQYYILPEEYQTMFPDGRAKLKVYLNSNYTASDGTNQDFLKGKKSWRLPHGEIYYMKLCQDFSLQNGQLTFDSQNQNMLHFPKNRNNFVVGQRSIDNTPPMTKAEWRTNHQTGVPGMLRIMQASGRNFPTGRYHEIFIPVPTKKDCKQLYPVDEKAVERFLDLAGEQTKSQQNEKNLKQYQILPYHPVGTKRNTDPETNDRYMDLNSGDIVYFRPDATGTKVEEISFSSIWRDRVEDDNHNRAGVHAFFGNIDKELLPFNPKRAEISPAELLFGFVEERERGKVDDGQAPAFAGKVRVSFGRLSSEKKPDTIFQDQVTLKALSSPKPPSPALYFTGNGNGSIAKPDLTLSRHSPQGRKFYLHAWQEENEIIKFLSNGKKTSPTVINGLYPWESKSNLSRQLPDKHAKLKSAITPIKKGTVFYFHVDFDNLSEWELGLLCYALQPGKEFRHKLGMGKPIGLGSIHIEPAGLYLVHRGNRYSLDGVPDNSRYNGGIWQSEDKRLQEWQELYPRESTAAASSAAASPADFALKFSGTMTPSVQQALKRLGDPDNVVAPVHYPQVEGADLEEETYKWFVANDVGSQTKVGNRTTCTEEAARKSMLPLAGRGPLPRLKRYKWCP

SEQ ID NO: 26 - protein, 1225 aa, Desulfobulbus sp.
MAAVQDRWTLMDQQGNELKRFRITAELETASSLHIGASETVEHDLIKNDDGTPVQINALITGAGGLPIIPGSTIKGRFLARLRERGVDSALLETLFGKGHDRETEDQGRGGRAEFHDAPLCHRLSGARHFPYWRPERQIWVKAQTAVDRHRGTALRRSLRYTEMVPPGVRFRLTITGCMTDAEADVLFALLEDLGDPRQACSFGGAGADGNGTMRLFGRPEVYCLDRSGILGWLASFEKGGNGGMAMTAAALLQADTVQRRADKVRQAWQPPDVGPRLHVELRFSGPFLVNDPSRNTPDITQAPDMVPLVDEDGNPMLPASSFRGALRAQAERIIRTLGGRCCDTSSPCRPLGSSDKVGELCLACQVFGAPGWGTTLHIQGFTCTSVFRREQEQTFVAIDRFHGGCKEGALYTIRHAESPRFEGHLVIDPRMPAWGRGLLALVFRDLREGDITFGLGAGKGYGVVDAAVVQDMAELEPYVEAFREQCRQHQGMADCHSAPSPQPLRDHDLAEIPPAEEAPGETFLNPYHFVPIREPDTGSWLARDELDSSCCHSHGFYRQQVDDRPLYHGRLTCLLETETPLFIGATGDSSVPSRIENYRLGNRIAIPAASLRGMLSSLAEAASNSAMRVLHQGILSYRKKAKNALREIGMIVLRDGKRFILPLVPLMEVTKLRHAYTDPAMKHFLDDKNSWSPRCNRVYYLGRDGNQIPAETRGAGMRPGILRLLGREGRHDALQNKKHEYFIEIPERYVDQDHCFDYRMFIRDRARNGTLVPISPVAWERYHCLAEERTLSQKNDPELREDKACASLKWLPFHPKGRVRERDPENDVCHLSLRHGDLVFYAEQNRVVSEISFSAIWRSRVETSDSYQAVTVDCFVPKELRPFNRDRRAISPAELLFGFVELDESEHSTEKSRYEQMAFAGKVRLSAGLPVEDVEDSALLEPKPIVLKALSSPKPPSPPFYFVMRDGSGAYIAKKDLSPDRHRIKGRKHYLHGLRQRGNPDRVQSLDRYGHATETAANPPWETCHPEERPQIKVRVQPVRRKTKFFFHLDFSNLSRWELGLLCYVLRPTACFRHKLGMGKPLGLGSVRIDIASLQLIDRVRRYGTDDLTAGRYNMGGHFNASCLDLLPQQDSPAPDDSGAAPDPGTLRQDFVKTMDETVFRALDLLGNPAHVQRPVHYPQVREMDIEDQTFLWFVDNDKQWKDALQPLTSSSTQLPPLTRRNKR

SEQ ID NO: 27 - protein, 1234 aa, Unknown
  source: /note="Description of Unknown: Gammaproteobacteria bacterium sequence"
MTTVKEKSWAFTGLKRWKIITTLETQTPLHIGSGEVAEIEINDSQGDRRQVQANAIIRGKDDKPIIPGSTLKGKLRSHFESCLDHSKALERVFGKEYQSDEEQGRGGLAEFHDAVCSYVAPGNSYYPNWNEARNTYIEASTTIDCHTGTAADATLHYNECVPPGTRFLVTVTGAMSDKDAALIVAALQAFGDETNPIHLGAEEANGKGRMGLFGNVEVSCLDHDDIIAWISQGSDARMATDKFKPLGKEKVNDLAKNITTPTATGGAQRQHFGIELKFDGPFLVNDPSKYSKGDGDQPAVHQPLTDRSNNPILPARSFRGAIRAQAERIIRTMGGACCDTQSPCQNSGQLCIACQMFGTTGWKTTLSISDFTYDGEYRPAKTQQFVAIDRFHGGGKDGALFSIKYFERPVLKGGISLKLRNQNADELSWRKGLLALLFRDLQEGDITFGFGANKGYGGVEEACITNADVISTADIEAFRAKCHANHADSWCSPVSKPTNRDDKSSLPSINPATGAGHAFHNPYHFIPIKAPDTSTWLDKHKLATPGSPHSHAYYRSCSDDDKPLHHGRITCKLTAETPLFVGSGDAENQLTDSEAKLKEHYQLNNKLAIPATSLRGLISSLAEAASNSALRVLDNGVLSYRKPASRALRKIGILFKREEQWRLVQMEGNLANAIKLKSAYTNQKMMDFLANKQSWSPEHNVVYYLSADFRPGDVPQETYLAGRICGILRILGGKDGDRKNELENKKHELFIRVDEQYVDTEINRFDYEEYVRQGGIPVSPSAVERYTELADQRSLSQKNSRDLKGDNNCCSDKWLPFHLKGAARYKKEKACLLPLREYDLVYFDSDGTQVTEISFSAIWRDRVADKVHAFFPEELRPFNQKRKWISPAELLFGFVELNDNKDERDHAQAFTGKVRVAAGVLSPDDSIRQGDLQEHEPIMLKALSSPKLPSPALYFKQKSGDHRYIAKPDLKKASHQAQGRKIYLHALRDQKDDVQKLNTKGQPANGNGAHLPWKTADEDERPQLKVRIRPLKPGTSFYFHLDYNNLTEWELGLLCYVLQPSETFRHKLGMGKPIGLGTVKIEIATLQTIDRQKRYREAGANEHRHNGSNWVNESLRDELERLPGTVELSPDRQPEAKLRPDELRQSFIATMDNDIYRAIELLGDPHNIKYPVHYPQVRNKSIEQENFKWFVANDSGSGDQRKGTGIDAKEEPMRSIDQISTTIPTLNRYEWNGD

SEQ ID NO: 28 - protein, 1258 aa, Desulfobulbus sp.
MARNNKQYHFIPRWEIKVNLTTRSFLHIGCDEFTDRPGLEIEQKDGSKVKAEINAFIKDSNGKPYLPGSTIKGNIRKWLETNKKADEETCKLFNTLLGFTVKMQDEGCGGSAEFHNAVISSPLEDGNNFPYWDVDLQTSVETSTVIDRVTGTVVDGRLFSTEVVPPEVSFTLIITGAMTEQQVSLLTAVIKDGFAEDCPTPITIGADSGNGFGRFRFDSIHMKCLGTGEVLNWLEDGSQDMAATAMRSLSPDDIEQHIIKGRNYLKSPSVSDTVTIEFGFAGPFLVNDPSRKKRKEDIDHQPLRDSAGNARLPAKSIRGAMRSQAEKIIRTLGGWCCDPVNPCPSVFSVVEINDRLCLACRVFGATGWKSRISIQKVEYKGTAESTRQETVQDFVAIDRFHGGGKETAKFDASFSWRPQYSILMHIPSDLEGWAKGLLALTFRDFKEGDIFLGYGRSKGYGRVDSDSVKPGIDTMLTESNLELFRRKCDDNPGEYPCKTRQPPNLVQPVERNNLTEAADEGSFHNPYHFIPTPKPMIESWLAKEDFDETMHDSHALYRDVDENEEPLYHGKISCTLTTETPVFVGGKHDPRNDTEPQQVDHYTENGEIAIPATTLRGLLSSLSEAASNSSMRVLDDGMMSYRQPVGSGSLSAIGMVVIRDGKKFIYPLALPIFGERDKLPQEYHIMFPYTQKAPLKVYLERAYLAGNMKSFLDKQNSWNLLNEKIFYLPVPEFSFSRVHTMGAENRDVLKISRRGNLILGARLPVNLCPRSKEKALPGDIPGILRILGKEGRDGEVPVGKKHELFIPVSDGFASNPRSFIDNLTSKELFKIPDEVVDRFEELADDRTTQQIKHPGNVKNNNQWLPFHLKGCTRNDGLTGKDEKRLRVQEGDLMYFRPSPQSPQVAEISFSAVWRGRVNKTVHNYFPPELVQFNKNREKISPAELLFGFVQQDKHEKSLSFAGKVVLSSGKQLRETESVSRENEVTLKILASPKLPSPSLYFKRENYIEGGNYIAKNEMNNSSNIKPRGRKQYLHALSNSEDPKGVQKISRTGSVDDGGNYPWQSMNNDNIKQKVCIRPVSKDGCFTFEMEFENCTEWELGMLLYALRPSQQYRHKIGMGKSIGLGTVRIDINNLQFIHRKNRYNAGIIDVPRYNYEAGHDMDYFHNKFADTIMPEIKNSIELLGDPRNVRFPVHYPQVHGADIEDKTYQWFVANDSGTNNGQNGAAYKKNKAEESSLTELDEISNTIPGLERHEWLGR

SEQ ID NO: 29 - protein, 1235 aa, Unknown
  source: /note="Description of Unknown: Methylococcaceae bacterium sequence"
MALKTWTLNGEERWHISVVLETVTPLHIGSGEFCYRPELTNADQKPVDINACIKGANNLPIIPGSTVKGKFNAWLTARQVDTPLLEAIFGKGHNPDDDDQGSGGKVEFHDAWISTKIKDTSTWPYWQVATQTFIDAATAIDRHSRTALDASLHYTECVPPGVQFTLNITGVMQEHEAALIIAALDRFDQHDDQPYFGAGDANGQGQLILVGHLAVKVMGKTEITEWLAHFNNKASDMAMSHARSLGAEDIAGLIKLGQTLLKPVPPTVSLGIQLQFAGPFLVNDPYAVKKLEADPKTKIDHYPLLDNHKKPRLPSASIRGVLRSQAERIIRSLGVHCCDTRDPCPSLYKHQDLSQLCLACQIFGAAGWKSVINISDFTCVDANELKTQEFIAIDRFHGGGKDGAKFNAKHSERPYFQGRITLSPRMANHQLDWGKGLLALVIRDLQEGDLSFGFGANKGYGALESVLITGIDQLQTDAIEAFRRLCVTQAAPQAFITPTSAVVIGDKAPLVVTDKKLPDNSFHNPYHFIPINSPDTRHWLPTETDLAESHHSHAYYRQQPELFHGQLICRLYTETPTFIGASKKDDTLPAELDNYRLNGQLAIPATSLRGMISSLAEAASNSAMRVLDNGLLSYRKDASLALSKIGITFINRQGQWQLIPMEKIKLKNAYSAENMRLFVEQSHSWSPDYNTVYYFSEKAGAFDVPQRTPKPGWQPGILRLLGKEGRSQELENKKHEWFIPVPENYIDKQLNAFKYQEYLKDNSSKAIDIPAPVLNRYNELAYQRTLSQKKDTELVADGDSPAWLPFHLKGQQRQPQMVGKHLVYTLPMTEYSLVYYAATNKVATEISYSSIWRGRVQDDADQAATVNHFIPDDLLPFNPKRTSLSPAELLFGFTELDPDKHSNDPTRSFAGKVRIGAATLAAYPSNDSDLLAPEHITLKALSSPKLPSPALYFRTLQGNNSNVYIPKHELNPNHHTAKGRKYYLHATRTPDQKRILKLSDQGHPPQNNAVKLPWLSHQETKNLQLKVKIKPIKPKQSFYFQVDFNNLTAWELGLLCYALRPTIDFRHRIGMGKPLGLGSVKIDILALQTLDRQKRYAQDSQDSARYNQHRWVNSSVTDMLAQAGYDVIEPTANPLVPKDLKTLFSQTMAANIDRALTLLGEPQHVKQPVHYPQVRDTAIQVRDTAIEEESYQWFVANDNLSDNSSAAKQTLHDITETSEGLPTLIRHQKKKETQP

SEQ ID NO: 30 - protein, 1276 aa, Unknown
  source: /note="Description of Unknown: Gammaproteobacteria bacterium sequence"
MSDTQKQAIHENKWHFRGIKRWEISAYLKTLSPLHIGDGGTIPVTIKDTQGKNREVEVNSVITGKAALPIIPGSTIKGRLRHYFSKHFSDKALLNKVFGEESDATDDDQGRGGLAEFHDAKWNPEKNRNLQGRYPYWNNTRKTYIEVSTAINRHTGAAKDKSLHHTECVPPGTVFEIKITGSMDDRCAALVVAALEAIQTTGSRIFLGAEDANGNGRIGLTGKITVKQMDQAHIIQWLQKDSTTCVASFSNVKAENETQVKQMVQRHIAPKLNSVVSAAGPSYDITLHFDGPFVVNDSDKCKAEDTPDIYPLEEKNGVPAFPVRSFRGAIRSQAERIIRTIGGQCCDGSINNTCKNPKNLCIACEMFGSTGWKTSIEMDPFLCVDRELKPFIIQEFVAIDRFHGGGKDEAKFNAAHYQAPVFKGKVRVSQRVGNDISWRKGLLALIFRDLKEGDIYFGFGTNKGYGAVKKAEINPDGNASDFSESDIEAFINKCREKKGLYNCNPIKKPGKTKVSKNLPPAIVPLDRTDSKFYNPYHFIPVKKPNTSSWAEKTAFGTADSPHSHGFYRKQTNEQQPLYSGRLICMLTSETPFFIGAQAESDPTENENQASLRHPYQLDGEPAIPSTSLRGLISTMTEAAANCAMRVLDSEIISYRKPMNPSHILSALGMVTKRGEDFWLIPLAMPALSLNDEEHNYKLDKRYRTMFPDGLAKLKVYLEKAYSNNVMKTFLNNENTWTLAQSKIHYLPLTPIQMQNGGINSYYNNLRTPSRSNNFLIGQTVAHGNGIPASGPGAGMVPGILRILGKEHRQNDLPQNKKHELFIPVPDAFVADPKTFLDTATAFLIPRNVIDAFEKIAEKQTQSQKQDKLKHDEERLPFHLKGTRREQNHTLQIKTGDLVYFRPNAKGDEVEEIAFSSIWRGKTSGTTADFFPDKELLPFNRNRSRVSPAELLFGFTENNPKEMKIDRGLAFAGKIRISAGTLSDKFSDTTESDLFEPETTLKALSSPKPPSPALYFKEKKSGTQYIKKQDLNPGKHEIQGRKIYLHALRNENNQNVQRITSQGKFDNAANRTQPWVSQNEERNHLKTKCKPLKSGLNFFFHIDFNNLTQWELGLLCYALRPCETFRHKIGMGKPIGLGTVKIDIAVLQTIDRYARYTDTTQDSERYNQGAWISQELQNEIPNQYKGKGISNKKGMLSPEDCRKVFMETMDADIQRAIELLGDPGNVTSPVHYPQLDRKNIETKNYEWFKQNEIEQQVLKPITKNTTHLTPFARWEQG

SEQ ID NO: 31 - protein, 1221 aa, Unknown
  source: /note="Description of Unknown: Methylobacter tundripaludum sequence"
MNLPTWKLNNEKRWHISIVLTTATPLHIGSGEFCEHDDVKNNDGEPVKINACIKGSKGRPIIPGSTIKGKLYEWLKTRNTEENLLEKLFGKGHNSVSQDQGRGGKAEFHDAEIIEPLTGSQPWPYWREEHQAFIAASTAIDRHKQVALQQSLHYMETVPAGIRFKFTFTGVMRDEEAALLIAALDSFDKNQNQPCFGVDRANAYGRMELHGHLHVKVMGATEISSWLNSFSENDKKMAMESARNLEQQEINTLIKQGNALFKASCDEVKLGLTLKFKGPFLVNDPYAVKILSSNENAKTDHYPLLDKNRNPYLPVSSFRGVLRSQAERIIRTLGGKCCSTDDPCKPIFDKGDLSKLCLACQIFGASGWKTVINIHDFKAINKSKKTKQDFVAIDRFHGGGKDGAKFDATHFERPEFEGAISFSPRMANNDLDWGKGLLALVLRDMQEGDMTFGYGANKGYGGLESASITGIEQITSDIQAFRDKCVASPQTWLCDEAVKPANQQDKIPPAGIQVANSGFHNPYQFIPSKDPDTGHWLPVLGLNADSHHSHAFYRDQTDNGEKLYHGRLICCLNTETPIFIGADKKKDTEPAEINNYRLNGELAIPATSLRGMISSLAEAASNSAMRVLDNGLLSYRKTADDALRKVGMVIYVDNKSFIIKLNDAIKLKQTYTPGNMKDFIEKSNSWSPEHNTVYYLDNNQIPQESYMNGMKPGILRILGKEGREQELENKLHELFIPVPLEYVDTENNKFDYQAYKKAFLYRAIEIPEPVLKRYSELADQRTMSQKSNKELKKDDTCQSVGWLPFHLKGTKRQLDDKHKVGKLQIDEYDLIYYEASGKEVTEVAFSSIWRGRVETNSSQANKVYSFIPGELLPFNESRKKVSPAELLFGFTQINKDGSKADDKAQAFAGKVRISAGTISEYPESEANLLEQEVTLKALSTPKLPSPALYFRTINGNGSAYISKQELEPSKHLAKGRKYYLHALRTGDNKVQKLGSQGETANGGDSKLPWVTHNPDERPQLKVKIKPIKAEFIFSLDFNNLTEWELGLLCYALRPTDSFRHRIGMGKPLGLGSVKIDIMALQTINRQQRYAQDGLEENRFNRHNWVNPPHQPRLDKAGYSISLSSTPLNPEILRATFTKTMNADIYRTLELLGNPQNVKRPVHYPQVENHNIEQENYKWFVANDQGSGKGRNKIDPAEKALKILTENSDCLPTLSRLDWRDE

SEQ ID NO: 32 - protein, 1444 aa, Nitrosomonas sp.
MNNKGSNMTDTVKSGRWIITGQFQLVTPMHIGTGLDEEMDKQSGESVDKKQNNSWIQAIALDLNKKPYIPGASIKGALKALARRYYCASNLNIFGDTIDTKDGDNKRKSVTVAGQAEFLNAWYAADQEDKPFDTITRVAIDRVTGTAEDRKLFNTRRVNPGVCFNYKIIIQNACETEIQYLLDLLRKAAKDPSFSLGAGANQSQGKVRCLSSCVRYFGKQEMHDWFRAIQNGKQEHWQIFAKPSNIKYADLERPDIIANSLNLPLTLDFHTPFLVKASKKKDEAKNEADAKPRTNHQGQVILPASSLRGRLRAQAEKILRTMGQDIPQGHAAPAYDGIAHRDLISLLFGTAGWKGIVCASDLIHSIPEYALQFNGVRETISDLSDTVKSCIIVDLVKTSTAAEKTEEQLHIRIVDSAGSLIVHKSENSSWANDTFRDASVKDNFKARLKEIADPQDLSDALRADIKKRAFQLATLTRHEMVAIDRFTGGGKEGAKFNVDYIECPTLTGAIYLDLHRLKQAQLKNDEDALKPALGLISLLLRDLAEGDIAFGFGANKGYGQCREHAVLDNWEERLKKIGAGLTIDGALQALRDTVALEPPAEFPPEIEKTTDDNQPEAPDFNLKPASNGFHNPYHFIPLNNPKIGDWPEAKAETLKANREGHDQYHTGKFSGRIVCSLTTQTPLFIGAETKPSTSDREPSEARPFKLNGKHAIPATSLRGMLSSLFESVSNSNFRVLHPEHYSVRKSLDDYVALSAMGRIVDDQGELKLQPLTLPTLFGNRNNVPAKWEKIFGTPSEDDFLRIYFDDIPSKFSSNKRYFYNCKATELKDFIKSDKYFIGKRTPTVFPKSSTEKSHLESLEFIDVEKFKKAVENLEITPGNNPYIHGWVRNLKDEFREDIPDNVKHHVFLPDTTKRVSPLEIPPHVKKRFHELADLALAGLHLKQGETIASPYKILPYTPIGRNKLENHIHRVPNDLTCYMTRLKKGDLVFFDVDNDGQITEISFSSIWRAGIGTKNKLQTTADLLSQRDPNLVQLGMGVRTKNTDRFKLSPAERLFGVVEHRDDDNTTVENVNQPNDKAQAFAFAGKVRIGFGLPDKKTTVNGVSPVTLKELSSPKPPSPAFYLKRKNNDDFVSKKVAAECSETMTLRGRKCYLHAWREQNGNVMKLDAIGVNSGGSTCKPPWKTHKPAANDQKEFEEDKNKFITSRQVKIAPISENTPFYFEIDFNNLDATELAQLCATLQPAPKFEHRLGMGKPLGLGSVKIEPVGLFLINRHQRYTTDSTNCDRYHYAWLKGEHAAWDWPEYFRQNVVTADCTQTFNDTFDKLVQNGLAGTDADIKHALQLLGDPQYIGVPVHYPIAGNSTLENKHFEWFGNNDKASVLRQKAQANSKNHHYQPKQQATPEEPQYLHTITKDSKQISLLKKNKIEDIENRDQQKHRYSNHRR

SEQ ID NO: 33 - protein, 385 aa, Artificial Sequence
  source: /note="Description of Artificial Sequence: Synthetic polypeptide"
QLHLPQVLADAVSRLVLGKFGDLTDNFSSPHARRKVLAGVVMTTGTDVKDAKVISVSTGTKCINGEYMSDRGLALNDCHAEIISRRSLLRFLYTQLELYLNNKDDQKRSIFQKSERGGFRLKENVQFHLYISTSPCGDARIFSPHEPILEEPADRHPNRKARGQLRTKIESGQGTIPVRSNASIQTWDGVLQGERLLTMSCSDKIARWNVVGIQGSLLSIFVEPIYFSSIILGSLYHGDHLSRAMYQRISNIEDLPPLYTLNKPLLSGISNAEARQPGKAPNFSVNWTVGDSAIEVINATTGKDELGRASRLCKHALYCRWMRVHGKVPSHLLRSKITKPNVYHESKLAAKEYQAAKARLFTAFIKAGLGAWVEKPTEQDQFSLT

SEQ ID NO: 34 - protein, 336 aa, Artificial Sequence
  source: /note="Description of Artificial Sequence: Synthetic polypeptide"
SLGTGNRCVKGDSLSLKGETVNDCHAEIISRRGFIRFLYSELMKYNSQTAKDSIFEPAKGGEKLQIKKTVSFHLYISTAPCGDGALFDKSCSDRAMESTESRHYPVFENPKQGKLRTKVENGQGTIPVESSDIVPTWDGIRLGERLRTMSCSDKILRWNVLGLQGALLTHFLQPIYLKSVTLGYLFSQGHLTRAICCRVTRDGSAFEDGLRHPFIVNHPKVGRVSIYDSKRQSGKTKETSVNWCLADGYDLEILDGTRGTVDGPRNELSRVSKKNIFLLFKKLCSFRYRRDLLRLSYGEAKKAARDYETAKNYFKKGLKDMGYGNWISKPQEEKNF

SEQ ID NO: 35 - protein, 340 aa, Artificial Sequence
  source: /note="Description of Artificial Sequence: Synthetic polypeptide"
SVGTGNRCLTGDHLSLEGNSVNDSHAEMITRRGFLRYLYRHLLEYDAEVPNDLFEKGERSICRIKTNITFHLYISTAPCGDGALFSPRDTDSSNAKMEEENKHIHNPTFSSSVQGLLRTKVEGGQGTIPIDADFTEQTWDGIQRGERLRTMSCSDKICRWNVVGLQGALLSHFIEPIYLDSLTLGYLYDHGHLARAVCCRIERGEASVNQLLPEGYRLNHPWLGRVTACDPPRETQKTKSLSINWCYDDEKSEVLDGTAGICYTAIEKNLFSRLTKHNLYEEFKRVCRKFDRNDLLTAPSYNKAKMMATPFQTAKNVMLKKLKENNCGTWVSKPIEEEMF

SEQ ID NO: 36 - protein, 340 aa, Artificial Sequence
  source: /note="Description of Artificial Sequence: Synthetic polypeptide"
SVGTGNRCLTGDRLSLEGNSVNDSHAEMVTRRGFLRYLYKHLLEYDPEKPHDLFEKGERSLCRIKTNITFHLYISTAPCGDGALFSPRDTDSSNVKVDEENKHVHNPTFSSSVQGLLRTKVEGGQGTIPIDADFTEQTWDGIQRGERLRTMSCSDKICRWNVVGLQGALLSHFVEPIYLESLTLGYLYDHGHLARAVCCRIERGEASVNQLLPEGYRLNHPWLGRVTACDPPRETQKTKSLSINWCYDDEKSEVLDGTAGICYTAIEKNLFSRLTKHSLYEEFKKVCQKFEREDLLNVTSYNKAKMMAIPFQTAKNVMLKKLKENNCGTWVSKPIEEEMF

SEQ ID NO: 37 - protein, 328 aa, Artificial Sequence
  source: /note="Description of Artificial Sequence: Synthetic polypeptide"
GIGTGTKCINGEHMSDRGFGVNDCHAEIIARRCFLRYIYDQLELHLSDNSDVRNSSIFELRDKGGYQLKENIQFHLYISTAPCGDARIFSPHGQDVETGDRHPNRKARGQLRTKIESGQGTIPVRTSGVIQTWDGVLEGERLLTMSCSDKIARWNVLGIQGSLLSHFMNPIYLESIILGSLYHSDHLSRAMYSRISIIENLPEPFHLNRPFLSGISSPESRQPGKAPNFGINWRKEDETFEVINAMTGRVEGGSVSRICKQALFGRFMSLYGKLSSLTGQSVTTRPTHYSDAKAAVMEYQLAKQCVFQAFQKAGLGNWVQKPIEQDQF

SEQ ID NO: 38 - protein, 328 aa, Artificial Sequence
  source: /note="Description of Artificial Sequence: Synthetic polypeptide"
GIGTGTKCINGEYMNDRGFAVNDCHAEIIARRCFLRFIYDQLEMHLSEDPEVRGQSVFELRDGGGYKLKPNIHFHLYISTAPCGDARIFSPHGQDVETGDRHPNRKARGQLRTKIESGQGTIPVRSSGFIQTWDGVLEGERLLTMSCSDKIARWNVLGIQGALLCHFMHPIYLESIILGSLYHSDHLSRAVYCRIASIENLPDLFQLNRPFLSGISSPESRQPGKAPNFGINWRRNDDTFEVINAMTGRVEGGNMSRICKQALFDRFMNLYGRLSSLTGQSVTTRPTLYSEAKAAVMEYQLAKQCVFQAFQKAGLGNWVQKPIEQDQF

SEQ ID NO: 39 - protein, 328 aa, Artificial Sequence
  source: /note="Description of Artificial Sequence: Synthetic polypeptide"
GIGTGTKCINGEYMNDRGFAVNDCHAEIIARRCFLRFIYDQLELHLSDNAEVRGQSIFELRDAGGYKLKPNIQFHLYISTAPCGDARIFSPHGQDVETGDRHPNRKARGQLRTKIESGQGTIPVRSSGFIQTWDGVLEGERLLTMSCSDKIARWNVLGVQGALLCHFMHPIYLESIILGSLYHSDHLSRAVYCRIAAIENLPDLFRLNRPFLSGISSPESRQPGKAPNFGINWRRNDDSFEVINAMTGRVEGGSMSRICKQALFDRFMNLYGKLSSLTGQSVTTRPALYSEAKATVMEYQLAKQCVFQAFQKAGLGNWVQKPIEQDQF

SEQ ID NO: 40 - protein, 236 aa, Unknown
  source: /note="Description of Unknown: APOBEC1  sequence"
MTSEKGPSTGDPTLRRRIEPWEFDVFYDPRELRKEACLLYEIKWGMSRKIWRSSGKNTTNHVEVNFIKKFTSERDFHPSMSCSITWFLSWSPCWECSQAIREFLSRHPGVTLVIYVARLFWHMDQQNRQGLRDLVNSGVTIQIMRASEYYHCWRNFVNYPPGDEAHWPQYPPLWMMLYALELHCIILSLPPCLKISRRWQNHLTFFRLHLQNCHYQTIPPHILLATGLIHPSVAWR

SEQ ID NO: 41 - protein, 224 aa, Unknown
  source: /note="Description of Unknown: APOBEC2  sequence"
MAQKEEAAVATEAASQNGEDLENLDDPEKLKELIELPPFEIVTGERLPANFFKFQFRNVEYSSGRNKTFLCYVVEAQGKGGQVQASRGYLEDEHAAAHAEEAFFNTILPAFDPALRYNVTWYVSSSPCAACADRIIKTLSKTKNLRLLILVGRLFMWEEPEIQAALKKLKEAGCKLRIMKPQDFEYVWQNFVEQEEGESKAFQPWEDIQENFLYYEEKLADILK

SEQ ID NO: 42 - protein, 199 aa, Unknown
  source: /note="Description of Unknown: APOBEC3A  sequence"
MEASPASGPRHLMDPHIFTSNFNNGIGRHKTYLCYEVERLDNGTSVKMDQHRGFLHNQAKNLLCGFYGRHAELRFLDLVPSLQLDPAQIYRVTWFISWSPCFSWGCAGEVRAFLQENTHVRLRIFAARIYDYDPLYKEALQMLRDAGAQVSIMTYDEFKHCWDTFVDHQGCPFQPWDGLDEHSQALSGRLRAILQNQGN

SEQ ID NO: 43 - protein, 251 aa, Unknown [sequence omitted]

SEQ ID NO: 44 - protein, 190 aa, Unknown
  source: /note="Description of Unknown: APOBEC3C  sequence"
MNPQIRNPMKAMYPGTFYFQFKNLWEANDRNETWLCFTVEGIKRRSVVSWKTGVFRNQVDSETHCHAERCFLSWFCDDILSPNTKYQVTWYTSWSPCPDCAGEVAEFLARHSNVNLTIFTARLYYFQYPCYQEGLRSLSQEGVAVEIMDYEDFKYCWENFVYNDNEPFKPWKGLKTNFRLLKRRLRESLQ

SEQ ID NO: 45 - protein, 455 aa, Unknown
  source: /note="Description of Unknown: APOBEC3D  sequence"
MNPQIRNPMERMYRDTFYDNFENEPILYGRSYTWLCYEVKIKRGRSNLLWDTGVFRGPVLPKRQSNHRQEVYFRFENHAEMCFLSWFCGNRLPANRRFQITWFVSWNPCLPCVVKVTKFLAEHPNVTLTISAARLYYYRDRDWRWVLLRLHKAGARVKIMDYEGERCRGQGSMTGRNSLRDGWICNAMAGGVPGQPAGVGLALIATDSQETRPGRAGPGSGESLSASHLFISDFAYCWENFVCNEGQPFMPWYKFDDNYASLHRTLKEILRNPMEAMYPHIFYFHFKNLLKACGRNESWLCFTMEVTKHHSAVFRKRGVFRNQVDPETHCHAERCFLSWFCDDILSPNTNYEVTWYTSWSPCPECAGEVAEFLARHSNVNLTIFTARLCYFWDTDYQEGLCSLSQEGASVKIMGYKDFVSCWKNFVYSDDEPFKPWKGLQTNFRLLKRRLREILQ

SEQ ID NO: 46 - protein, 373 aa, Unknown
  source: /note="Description of Unknown: APOBEC3F  sequence"
MKPHFRNTVERMYRDTFSYNFYNRPILSRRNTVWLCYEVKTKGPSRPRLDAKIFRGQVYSQPEHHAEMCFLSWFCGNQLPAYKCFQITWFVSWTPCPDCVAKLAEFLAEHPNVTLTISAARLYYYWERDYRRALCRLSQAGARVKIMDDEEFAYCWENFVYSEGQPFMPWYKFDDNYAFLHRTLKEILRNPMEAMYPHIFYFHFKNLRKAYGRNESWLCFTMEVVKHHSPVSWKRGVFRNQVDPETHCHAERCFLSWFCDDILSPNTNYEVTWYTSWSPCPECAGEVAEFLARHSNVNLTIFTARLYYFWDTDYQEGLRSLSQEGASVEIMGYKDFKYCWENFVYNDDEPFKPWKGLKYNFLFLDSKLQEILE

SEQ ID NO: 47 - protein, 325 aa, Unknown
  source: /note="Description of Unknown: APOBEC3G  sequence"
MELKYHPEMRFFHWFSKWRKLHRDQEYEVTWYISWSPCTKCTRDMATFLAEDPKVTLTIFVARLYYFWDPDYQEALRSLCQKRDGPRATMKIMNYDEFQHCWSKFVYSQRELFEPWNNLPKYYILLHIMLGEILRHSMDPPTFTFNFNNEPWVRGRHETYLCYEVERMHNDTWVLLNQRRGFLCNQAPHKHGFLEGRHAELCFLDVIPFWKLDLDQDYRVTCFTSWSPCFSCAQEMAKFISKNKHVSLCIFTARIYDDQGRCQEGLRTLAEAGAKISIMTYSEFKHCWDTFVDHQGCPFQPWDGLDEHSQDLSGRLRAILQNQEN

SEQ ID NO: 48 - protein, 154 aa, Unknown [sequence omitted]

SEQ ID NO: 49 - protein, 367 aa, Unknown
  source: /note="Description of Unknown: APOBEC4  sequence"
MEPIYEEYLANHGTIVKPYYWLSFSLDCSNCPYHIRTGEEARVSLTEFCQIFGFPYGTTFPQTKHLTFYELKTSSGSLVQKGHASSCTGNYIHPESMLFEMNGYLDSAIYNNDSIRHIILYSNNSPCNEANHCCISKMYNFLITYPGITLSIYFSQLYHTEMDFPASAWNREALRSLASLWPRVVLSPISGGIWHSVLHSFISGVSGSHVFQPILTGRALADRHNAYEINAITGVKPYFTDVLLQTKRNPNTKAQEALESYPLNNAFPGQFFQMPSGQLQPNLPPDLRAPVVFVLVPLRDLPPMHMGQNPNKPRNIVRHLNMPQMSFQETKDLGRLPTGRSVEIVEITEQFASSKEADEKKKKKGKK

SEQ ID NO: 50 - protein, 180 aa, Unknown
  source: /note="Description of Unknown: Activation-induced cytidine deaminase (AID)  sequence"
MDSLLMNRKFLYQFKNVRWAKGRRETYLCYVVKRRDSATSFSLDFGYLRNKNGCHVELLFLRYISDWDLDPGRCYRVTWFTSWSPCYDCARHVADFLRGNPNLSLRIFTARLYFCEDRKAEPEGLRRLHRAGVQIAIMTFKDYFYCWNTFVENHERTFKAWEGLHENSVRLSRQLRRILL

SEQ ID NO: 51 - DNA, 31 bp, Artificial Sequence
  source: /note="Description of Artificial Sequence: Synthetic oligonucleotide"
ctttgttgtcttcgacatgggtaatcctcat

SEQ ID NO: 52 - DNA, 31 bp, Artificial Sequence
  source: /note="Description of Artificial Sequence: Synthetic oligonucleotide"
taaagagttgaacttctttgttgtcttcgac

SEQ ID NO: 53 - DNA, 31 bp, Artificial Sequence
  source: /note="Description of Artificial Sequence: Synthetic oligonucleotide"
gtaccttcgtacggacgaccttcaccttcac

SEQ ID NO: 54 - DNA, 31 bp, Artificial Sequence
  source: /note="Description of Artificial Sequence: Synthetic oligonucleotide"
caggatgtcccaagcgaacggcagcggacca

SEQ ID NO: 55 - DNA, 31 bp, Artificial Sequence
  source: /note="Description of Artificial Sequence: Synthetic oligonucleotide"
cagggaggagtcctgggtaacggtaacaaca

SEQ ID NO: 56 - DNA, 31 bp, Artificial Sequence
  source: /note="Description of Artificial Sequence: Synthetic oligonucleotide"
catgaactctttgataacgtcttcgctactc

SEQ ID NO: 57 - DNA, 31 bp, Artificial Sequence
  source: /note="Description of Artificial Sequence: Synthetic oligonucleotide"
tcggaggtagcccgactcgctccggttcgta

SEQ ID NO: 58 - DNA, 31 bp, Artificial Sequence
  source: /note="Description of Artificial Sequence: Synthetic oligonucleotide"
tgaaagttggcgccttttttcatacgtcgag

SEQ ID NO: 59 - RNA, 300 nt, Artificial Sequence
  source: /note="Description of Artificial Sequence: Synthetic polynucleotide"
gggcgaaaucgguauuuccaaugaaaucacucagguuggaaagccgguuuucuuugaugucacggaaccgccaauauaacaauacagguauuauaguuggguuggaaagccgguuuucuuugaugucacggaacauuguaaacugcauaucuguguuugccgucugguuggaaagccgguuuucuuugaugucacggaacucacgugagucagucuuaguucuauacuucuuuaggguuggaaagccgguuuucuuugaugucacggaacaggaacuugaacaacaucguuacuaacgag

SEQ ID NO: 60 - RNA, 176 nt, Artificial Sequence
  source: /note="Description of Artificial Sequence: Synthetic polynucleotide"
gggggccagugaauucgagcucgguacccggggauccucuagaaauauggauuacuugguagaacagcaaucuacucgaccugcaggcaugcaagcuuggcguaaucauggucauagcuguuuccuguguuuauccgcucacaauuccacacaacauacgagccggaagcauaaag

SEQ ID NO: 61 - RNA, 153 nt, Artificial Sequence
  source: /note="Description of Artificial Sequence: Synthetic polynucleotide"
ggggcaaacuccggcaucuacuaauagacgccggccauucaaacaugaggauuacccaugucgaagacaacaaagaaguucaacucuuuauguauugaucuuccucgcgaucuuucucucgaaauuuaccaaucaauugcuucugucgcuacu

SEQ ID NO: 62 - RNA, 153 nt, Artificial Sequence
  source: /note="Description of Artificial Sequence: Synthetic polynucleotide"
gggggccagugaauucgagcucgguacccggggauccucuagaaauauggauuacuugguagaacagcaaucuacucgaccugcaggcaugcaagcuuggcguaaucauggucauagcuguuuccuguguuuauccgcucacaauuccacaca

SEQ ID NO: 63 - RNA, 150 nt, Artificial Sequence
  source: /note="Description of Artificial Sequence: Synthetic polynucleotide"
ggccagugaauucgagcucgguacccggggauccucuagaaauauggauuacuugggucgaagacaacaaagaaguucaacucuuuauagaacagcaaucuacucgaccugcaggcaugcaagcuuggcguaaucauggucauagcuguu

SEQ ID NO: 64 - RNA, 150 nt, Artificial Sequence
  source: /note="Description of Artificial Sequence: Synthetic polynucleotide"
augcccgccaugaagaucgagugccgcaucaccggcacccugaacggcguggaguugucgaagacaacaaagaaguucaacucuuuacgagcuggugggcggcggagagggcacccccgagcagggccgcaugaccaacaagaugaagag

SEQ ID NO: 65 - RNA, 150 nt, Artificial Sequence
  source: /note="Description of Artificial Sequence: Synthetic polynucleotide"
auucuaugucugguuuucgcucaaaaacuucccggaaaugacaacagcacggcaacgucgaagacaacaaagaaguucaacucuuuagcugugccuugggcaccaugcaguaccaaacggaacgauagugaaaacaaucacgaaugacca

SEQ ID NO: 66 - RNA, 150 nt, Artificial Sequence; identical to SEQ ID NO: 65
  source: /note="Description of Artificial Sequence: Synthetic polynucleotide"

SEQ ID NO: 67 - RNA, 150 nt, Artificial Sequence
  source: /note="Description of Artificial Sequence: Synthetic polynucleotide"
gcugugccuugggcaccaugcaguaccaaacggaacgauagugaaaacaaucacgaaugaccagucgaagacaacaaagaaguucaacucuuuaauucuaugucugguuuucgcucaaaaacuucccggaaaugacaacagcacggcaac

SEQ ID NO: 68 - RNA, 173 nt, Artificial Sequence
  source: /note="Description of Artificial Sequence: Synthetic polynucleotide"
gggguuuggaagccgggucgaagucaggcccguuaagaccgaguagauugcuguucuaccaaguaauccaguuuggaagccgggucgaagucaggcccguuaagacuaugcuuccggcucguauguuguguggaauuguuuggaagccgggucgaagucaggcccguuaagac

SEQ ID NO: 69 - RNA, 259 nt, Artificial Sequence
  source: /note="Description of Artificial Sequence: Synthetic polynucleotide"
ggggcuagcucaguccuagguauaaugcuagcgcugauuuaggcaaaaacggcuugaagacuaaaggaaggaauuaaugucacgguacgacuaaauggcaccacuaauuguugccuucuaaguuccuucuugaagacuaaaggaaggaauuaaugucacgguacguuuguuuaaccacaugaggcacaccgcccucgugagcuugaagacuaaaggaaggaauuaaugucacgguacaaucuccgccccguucguaagc

SEQ ID NO: 70 - RNA, 400 nt, Artificial Sequence
  source: /note="Description of Artificial Sequence: Synthetic polynucleotide"
augcccgccaugaagaucgagugccgcaucaccggcacccugaacggcguggaguucgagcuggugggcggcggagagggcacccccgagcagggccgcaugaccaacaagaugaagagcaccaaaggcgcccugaccuucagccccuaccugcugagccacgugaugggcuacggcuucuaccacuucggcaccuaccccagcggcuacgagaaccccuuccugcacgccaucaacaacggcggcuacaccaacacccgcaucgagaaguacgaggacggcggcgugcugcacgugagcuucagcuaccgcuacgaggccggccgcgugaucggcgacuucaagguggugggcaccggcuuccccgaggacagcgugaucuucaccgacaagaucaucc

SEQ ID NO: 71 - RNA, 103 nt, Artificial Sequence
  source: /note="Description of Artificial Sequence: Synthetic polynucleotide"
gggguuggaaagccgguuuucuuugaugucacggaaccuuuguugucuucgacauggguaauccucaugguuggaaagccgguuuucuuugaugucacggaac

SEQ ID NO: 72 - RNA, 103 nt, Artificial Sequence
  source: /note="Description of Artificial Sequence: Synthetic polynucleotide"
ggcguuggaaagccgguuuucuuugaugucacggaaccuuuguugucuucgacauggguaauccucaucguuggaaagccgguuuucuuugaugucacggaac

SEQ ID NO: 73 - RNA, 103 nt, Artificial Sequence
  source: /note="Description of Artificial Sequence: Synthetic polynucleotide"
ggggauggaaagccgguuuucuuugaugucacggaaccuuuguugucuucgacauggguaauccucauggauggaaagccgguuuucuuugaugucacggaac

SEQ ID NO: 74 - RNA, 103 nt, Artificial Sequence
  source: /note="Description of Artificial Sequence: Synthetic polynucleotide"
gggguucgaaagccgguuuucuuugaugucacggaaccuuuguugucuucgacauggguaauccucaugguucgaaagccgguuuucuuugaugucacggaac

SEQ ID NO: 75 - RNA, 103 nt, Artificial Sequence
  source: /note="Description of Artificial Sequence: Synthetic polynucleotide"
gggguugguaagccgguuuucuuugaugucacggaaccuuuguugucuucgacauggguaauccucaugguugguaagccgguuuucuuugaugucacggaac

SEQ ID NO: 76 - RNA, 103 nt, Artificial Sequence
  source: /note="Description of Artificial Sequence: Synthetic polynucleotide"
gggguuggaaugccgguuuucuuugaugucacggaaccuuuguugucuucgacauggguaauccucaugguuggaaugccgguuuucuuugaugucacggaac

SEQ ID NO: 77 - RNA, 103 nt, Artificial Sequence
  source: /note="Description of Artificial Sequence: Synthetic polynucleotide"
gggguuggaaaggcgguuuucuuugaugucacggaaccuuuguugucuucgacauggguaauccucaugguuggaaaggcgguuuucuuugaugucacggaac

SEQ ID NO: 78 - RNA, 103 nt, Artificial Sequence
  source: /note="Description of Artificial Sequence: Synthetic polynucleotide"
gggguuggaaagcccguuuucuuugaugucacggaaccuuuguugucuucgacauggguaauccucaugguuggaaagcccguuuucuuugaugucacggaac

SEQ ID NO: 79 - RNA, 103 nt, Artificial Sequence
  source: /note="Description of Artificial Sequence: Synthetic polynucleotide"
gggguuggaaagccggauuucuuugaugucacggaaccuuuguugucuucgacauggguaauccucaugguuggaaagccggauuucuuugaugucacggaac

SEQ ID NO: 80 - RNA, 103 nt, Artificial Sequence
  source: /note="Description of Artificial Sequence: Synthetic polynucleotide"
gggguuggaaagccgguuaucuuugaugucacggaaccuuuguugucuucgacauggguaauccucaugguuggaaagccgguuaucuuugaugucacggaac

SEQ ID NO: 81 - RNA, 103 nt, Artificial Sequence
  source: /note="Description of Artificial Sequence: Synthetic polynucleotide"
gggguuggaaagccgguuuuguuugaugucacggaaccuuuguugucuucgacauggguaauccucaugguuggaaagccgguuuuguuugaugucacggaac

SEQ ID NO: 82 - RNA, 103 nt, Artificial Sequence
  source: /note="Description of Artificial Sequence: Synthetic polynucleotide"
gggguuggaaagccgguuuucuaugaugucacggaaccuuuguugucuucgacauggguaauccucaugguuggaaagccgguuuucuaugaugucacggaac

SEQ ID NO: 83 - RNA, 103 nt, Artificial Sequence
  source: /note="Description of Artificial Sequence: Synthetic polynucleotide"
gggguuggaaagccgguuuucuuucaugucacggaaccuuuguugucuucgacauggguaauccucaugguuggaaagccgguuuucuuucaugucacggaac

SEQ ID NO: 84 - RNA, 103 nt, Artificial Sequence
  source: /note="Description of Artificial Sequence: Synthetic polynucleotide"
gggguuggaaagccgguuuucuuugaagucacggaaccuuuguugucuucgacauggguaauccucaugguuggaaagccgguuuucuuugaagucacggaac

SEQ ID NO: 85 - RNA, 103 nt, Artificial Sequence
  source: /note="Description of Artificial Sequence: Synthetic polynucleotide"
gggguuggaaagccgguuuucuuugaugacacggaaccuuuguugucuucgacauggguaauccucaugguuggaaagccgguuuucuuugaugacacggaac

SEQ ID NO: 86 - RNA, 103 nt, Artificial Sequence
  source: /note="Description of Artificial Sequence: Synthetic polynucleotide"
gggguuggaaagccgguuuucuuugaugucucggaaccuuuguugucuucgacauggguaauccucaugguuggaaagccgguuuucuuugaugucucggaac

SEQ ID NO: 87 - RNA, 103 nt, Artificial Sequence
  source: /note="Description of Artificial Sequence: Synthetic polynucleotide"
gggguuggaaagccgguuuucuuugaugucaccgaaccuuuguugucuucgacauggguaauccucaugguuggaaagccgguuuucuuugaugucaccgaac

SEQ ID NO: 88 - RNA, 103 nt, Artificial Sequence
  source: /note="Description of Artificial Sequence: Synthetic polynucleotide"
gggguuggaaagccgguuuucuuugaugucacgguaccuuuguugucuucgacauggguaauccucaugguuggaaagccgguuuucuuugaugucacgguac

SEQ ID NO: 89 - RNA, 103 nt, Artificial Sequence
  source: /note="Description of Artificial Sequence: Synthetic polynucleotide"
gggguuggaaagccgguuuucuuugaugucacgguagcuuuguugucuucgacauggguaauccucaugguuggaaagccgguuuucuuugaugucacgguag

SEQ ID NO: 90 - RNA, 103 nt, Artificial Sequence; identical to SEQ ID NO: 71
  source: /note="Description of Artificial Sequence: Synthetic polynucleotide"

SEQ ID NO: 91 - RNA, 103 nt, Artificial Sequence
  source: /note="Description of Artificial Sequence: Synthetic polynucleotide"
gggguuggaaaggggguuuucuuugaugucacggaaccuuuguugucuucgacauggguaauccucaugguuggaaaggggguuuucuuugaugucacggaac

SEQ ID NO: 92 - RNA, 103 nt, Artificial Sequence
  source: /note="Description of Artificial Sequence: Synthetic polynucleotide"
gggguuggaaagccgcauuucuuugaugucacggaaccuuuguugucuucgacauggguaauccucaugguuggaaagccgcauuucuuugaugucacggaac

SEQ ID NO: 93 - RNA, 103 nt, Artificial Sequence
  source: /note="Description of Artificial Sequence: Synthetic polynucleotide"
gggguuggaaagccgguuaacuuugaugucacggaaccuuuguugucuucgacauggguaauccucaugguuggaaagccgguuaacuuugaugucacggaac

SEQ ID NO: 94 - RNA, 103 nt, Artificial Sequence
  source: /note="Description of Artificial Sequence: Synthetic polynucleotide"
gggguuggaaagccgguuuugauugaugucacggaaccuuuguugucuucgacauggguaauccucaugguuggaaagccgguuuugauugaugucacggaac

SEQ ID NO: 95 - RNA, 103 nt, Artificial Sequence
  source: /note="Description of Artificial Sequence: Synthetic polynucleotide"
gggguuggaaagccgguuuucuuacaugucacggaaccuuuguugucuucgacauggguaauccucaugguuggaaagccgguuuucuuacaugucacggaac

SEQ ID NO: 96 - RNA, 103 nt, Artificial Sequence
  source: /note="Description of Artificial Sequence: Synthetic polynucleotide"
gggguuggaaagccgguuuucuuugaacucacggaaccuuuguugucuucgacauggguaauccucaugguuggaaagccgguuuucuuugaacucacggaac

SEQ ID NO: 97 - RNA, 103 nt, Artificial Sequence
  source: /note="Description of Artificial Sequence: Synthetic polynucleotide"
gggguuggaaagccgguuuucuuugaugugucggaaccuuuguugucuucgacauggguaauccucaugguuggaaagccgguuuucuuugaugugucggaac

SEQ ID NO: 98 - RNA, 103 nt, Artificial Sequence
  source: /note="Description of Artificial Sequence: Synthetic polynucleotide"
gggguuggaaagccgguuuucuuugaugucacccaaccuuuguugucuucgacauggguaauccucaugguuggaaagccgguuuucuuugaugucacccaac

SEQ ID NO: 99 - RNA, 103 nt, Artificial Sequence
  source: /note="Description of Artificial Sequence: Synthetic polynucleotide"
gggguuggaaagccgguuuucuuugaugucacggaugcuuuguugucuucgacauggguaauccucaugguuggaaagccgguuuucuuugaugucacggaug

SEQ ID NO: 100 - RNA, 153 nt, Artificial Sequence
  source: /note="Description of Artificial Sequence: Synthetic polynucleotide"
gggaaaucagcgaaaugcaccccgcauuacguuugguggacccucagauucaacuggcaguaaccagaauggagaacgcaguggggcgcgaucaaaacaacgucggccccaagguuuacccaauaauacugcgucuugguucaccgcucucac

SEQ ID NO: 101 - RNA, 153 nt, Artificial Sequence
  source: /note="Description of Artificial Sequence: Synthetic polynucleotide"
gggauucuaugucugguuuucgcucaaaaacuucccggaaaugacaacagcacggcaacgcugugccuugggcaccaugcaguaccaaacggaacgauagugaaaacaaucacgaaugaccaaauugaagucacuaaugcuacugaacugguu

SEQ ID NO: 102 - DNA, 34 bp, Artificial Sequence
  source: /note="Description of Artificial Sequence: Synthetic oligonucleotide"
gggatgaggattacccatgtcgaagacaacaaag

SEQ ID NO: 103 - RNA, 100 nt, Artificial Sequence
  source: /note="Description of Artificial Sequence: Synthetic polynucleotide"
augcccgccaugaagaucgagugccgcaucaccggcacccugaacggcguggaguucgagcuggugggcggcggagagggcacccccgagcagggccgca

SEQ ID NO: 104 - RNA, 200 nt, Artificial Sequence
  source: /note="Description of Artificial Sequence: Synthetic polynucleotide"
augcccgccaugaagaucgagugccgcaucaccggcacccugaacggcguggaguucgagcuggugggcggcggagagggcacccccgagcagggccgcaugaccaacaagaugaagagcaccaaaggcgcccugaccuucagccccuaccugcugagccacgugaugggcuacggcuucuaccacuucggcaccuaccc

SEQ ID NO: 105 - RNA, 600 nt, Artificial Sequence
  source: /note="Description of Artificial Sequence: Synthetic polynucleotide"
augcccgccaugaagaucgagugccgcaucaccggcacccugaacggcguggaguucgagcuggugggcggcggagagggcacccccgagcagggccgcaugaccaacaagaugaagagcaccaaaggcgcccugaccuucagccccuaccugcugagccacgugaugggcuacggcuucuaccacuucggcaccuaccccagcggcuacgagaaccccuuccugcacgccaucaacaacggcggcuacaccaacacccgcaucgagaaguacgaggacggcggcgugcugcacgugagcuucagcuaccgcuacgaggccggccgcgugaucggcgacuucaagguggugggcaccggcuuccccgaggacagcgugaucuucaccgacaagaucauccgcagcaacgccaccguggagcaccugcaccccaugggcgauaacgugcuggugggcagcuucgcccgcaccuucagccugcgcgacggcggcuacuacagcuucgugguggacagccacaugcacuucaagagcgccauccaccccagcauccugcagaacgggggccccauguucgccuuccgccgcguggaggagcug

SEQ ID NO: 106 - RNA, 60 nt, Artificial Sequence
  source: /note="Description of Artificial Sequence: Synthetic oligonucleotide"
ccggccauucaaacaugaggauuacccaugucgaagacaacaaagaaguucaacucuuua

SEQ ID NO: 107 - RNA, 175 nt, Artificial Sequence
  source: /note="Description of Artificial Sequence: Synthetic polynucleotide"
  modified_base (76)..(81): a, c, u, g, unknown or other
ggccagugaauucgagcucgguacccggggauccucuagaaauauggauuacuugguagaacagcaaucuacucgnnnnnnaccugcaggcaugcaagcuuggcguaaucauggucauagcuguuuccuguguuuauccgcucacaauuccacacaacauacgagccggaagcau

SEQ ID NO: 108 - RNA, 175 nt, Artificial Sequence
  source: /note="Description of Artificial Sequence: Synthetic polynucleotide"
  modified_base (45)..(50): a, c, u, g, unknown or other
ggccagugaauucgagcucgguacccggggauccucuagaaauannnnnnuggauuacuugguagaacagcaaucuacucgaccugcaggcaugcaagcuuggcguaaucauggucauagcuguuuccuguguuuauccgcucacaauuccacacaacauacgagccggaagcau

SEQ ID NO: 109 - RNA, 34 nt, Artificial Sequence
  source: /note="Description of Artificial Sequence: Synthetic oligonucleotide"
gggaugaggauuacccaugucgaagacaacaaag

SEQ ID NO: 110 - DNA, 100 bp, Artificial Sequence
  source: /note="Description of Artificial Sequence: Synthetic polynucleotide"
ccggcatctactaatagacgccggccattcaaacatgaggattacccatgtcgaagacaacaaagaagttcaactctttatgtattgatcttcctcgcga

SEQ ID NO: 111 - DNA, 35 bp, Artificial Sequence
  source: /note="Description of Artificial Sequence: Synthetic oligonucleotide"
ggttggaaagccggttttctttgatgtcacggaac

SEQ ID NO: 112 - DNA, 31 bp, Artificial Sequence
  source: /note="Description of Artificial Sequence: Synthetic oligonucleotide"
cgagtagattgctgttctaccaagtaatcca

SEQ ID NO: 113 - DNA, 35 bp, Artificial Sequence; identical to SEQ ID NO: 111
  source: /note="Description of Artificial Sequence: Synthetic oligonucleotide"

SEQ ID NO: 114 - DNA, 31 bp, Artificial Sequence
  source: /note="Description of Artificial Sequence: Synthetic oligonucleotide"
tatgcttccggctcgtatgttgtgtggaatt

SEQ ID NO: 115 - DNA, 35 bp, Artificial Sequence; identical to SEQ ID NO: 111
  source: /note="Description of Artificial Sequence: Synthetic oligonucleotide"

SEQ ID NO: 116 - DNA, 31 bp, Artificial Sequence
  source: /note="Description of Artificial Sequence: Synthetic oligonucleotide"
aacacaggaaacagctatgaccatgattacg

SEQ ID NO: 117 - DNA, 35 bp, Artificial Sequence; identical to SEQ ID NO: 111
  source: /note="Description of Artificial Sequence: Synthetic oligonucleotide"

SEQ ID NO: 118 - DNA, 31 bp, Artificial Sequence
  source: /note="Description of Artificial Sequence: Synthetic oligonucleotide"
aattgtgagcggataaacacaggaaacagct

SEQ ID NO: 119 - DNA, 35 bp, Artificial Sequence; identical to SEQ ID NO: 111
  source: /note="Description of Artificial Sequence: Synthetic oligonucleotide"

SEQ ID NO: 120 - DNA, 31 bp, Artificial Sequence
  source: /note="Description of Artificial Sequence: Synthetic oligonucleotide"
ttgctgttctaccaagtaatccatatttcta

SEQ ID NO: 121 - DNA, 35 bp, Artificial Sequence; identical to SEQ ID NO: 111
  source: /note="Description of Artificial Sequence: Synthetic oligonucleotide"

SEQ ID NO: 122 - DNA, 31 bp, Artificial Sequence
  source: /note="Description of Artificial Sequence: Synthetic oligonucleotide"
tttctagaggatccccgggtaccgagctcga

SEQ ID NO: 123 - DNA, 35 bp, Artificial Sequence; identical to SEQ ID NO: 111
  source: /note="Description of Artificial Sequence: Synthetic oligonucleotide"

SEQ ID NO: 124 - DNA, 31 bp, Artificial Sequence
  source: /note="Description of Artificial Sequence: Synthetic oligonucleotide"
cgccaatataacaatacaggtattatagttg

SEQ ID NO: 125 - DNA, 35 bp, Artificial Sequence; identical to SEQ ID NO: 111
  source: /note="Description of Artificial Sequence: Synthetic oligonucleotide"

SEQ ID NO: 126 - DNA, 31 bp, Artificial Sequence; identical to SEQ ID NO: 51
  source: /note="Description of Artificial Sequence: Synthetic oligonucleotide"

SEQ ID NO: 127 - DNA, 35 bp, Artificial Sequence; identical to SEQ ID NO: 111
  source: /note="Description of Artificial Sequence: Synthetic oligonucleotide"

SEQ ID NO: 128 - DNA, 31 bp, Artificial Sequence
  source: /note="Description of Artificial Sequence: Synthetic oligonucleotide"
cttctttgttgtcttcgacatgggtaatcct

SEQ ID NO: 129 - DNA, 35 bp, Artificial Sequence; identical to SEQ ID NO: 111
  source: /note="Description of Artificial Sequence: Synthetic oligonucleotide"

SEQ ID NO: 130 - DNA, 31 bp, Artificial Sequence; identical to SEQ ID NO: 52
  source: /note="Description of Artificial Sequence: Synthetic oligonucleotide"

SEQ ID NO: 131 - DNA, 35 bp, Artificial Sequence; identical to SEQ ID NO: 111
  source: /note="Description of Artificial Sequence: Synthetic oligonucleotide"

SEQ ID NO: 132 - DNA, 31 bp, Artificial Sequence
  source: /note="Description of Artificial Sequence: Synthetic oligonucleotide"
tctttgttgtcttcgacatgggtaatcctca

SEQ ID NO: 133 - DNA, 35 bp, Artificial Sequence; identical to SEQ ID NO: 111
  source: /note="Description of Artificial Sequence: Synthetic oligonucleotide"

SEQ ID NO: 134 - DNA, 31 bp, Artificial Sequence
  source: /note="Description of Artificial Sequence: Synthetic oligonucleotide"
taatcctcatgtttgaatggccggcgtctat

SEQ ID NO: 135 - DNA, 35 bp, Artificial Sequence; identical to SEQ ID NO: 111
  source: /note="Description of Artificial Sequence: Synthetic oligonucleotide"

SEQ ID NO: 136 - DNA, 31 bp, Artificial Sequence
  source: /note="Description of Artificial Sequence: Synthetic oligonucleotide"
ttcgacatgggtaatcctcatgtttgaatgg

SEQ ID NO: 137 - DNA, 35 bp, Artificial Sequence; identical to SEQ ID NO: 111
  source: /note="Description of Artificial Sequence: Synthetic oligonucleotide"

SEQ ID NO: 138 - DNA, 31 bp, Artificial Sequence
  source: /note="Description of Artificial Sequence: Synthetic oligonucleotide"
cgaggaagatcaatacataaagagttgaact

SEQ ID NO: 139 - DNA, 35 bp, Artificial Sequence; identical to SEQ ID NO: 111
  source: /note="Description of Artificial Sequence: Synthetic oligonucleotide"

SEQ ID NO: 140 - DNA, 31 bp, Artificial Sequence
  source: /note="Description of Artificial Sequence: Synthetic oligonucleotide"
tggtaaatttcgagagaaagatcgcgaggaa

SEQ ID NO: 141 - DNA, 35 bp, Artificial Sequence; identical to SEQ ID NO: 111
  source: /note="Description of Artificial Sequence: Synthetic oligonucleotide"

SEQ ID NO: 142 - DNA, 31 bp, Artificial Sequence
  source: /note="Description of Artificial Sequence: Synthetic oligonucleotide"
ttgaatggccggcgtctattagtagatgccg

SEQ ID NO: 143 - DNA, 35 bp, Artificial Sequence; identical to SEQ ID NO: 111
  source: /note="Description of Artificial Sequence: Synthetic oligonucleotide"

SEQ ID NO: 144 - DNA, 31 bp, Artificial Sequence
  source: /note="Description of Artificial Sequence: Synthetic oligonucleotide"
aatccatatttctagaggatccccgggtacc

SEQ ID NO: 145 - DNA, 35 bp, Artificial Sequence; identical to SEQ ID NO: 111
  source: /note="Description of Artificial Sequence: Synthetic oligonucleotide"

SEQ ID NO: 146 - DNA, 31 bp, Artificial Sequence
  source: /note="Description of Artificial Sequence: Synthetic oligonucleotide"
tgttctaccaagtaatccatatttctagagg

SEQ ID NO: 147 - DNA, 35 bp, Artificial Sequence; identical to SEQ ID NO: 111
  source: /note="Description of Artificial Sequence: Synthetic oligonucleotide"

SEQ ID NO: 148 - DNA, 31 bp, Artificial Sequence
  source: /note="Description of Artificial Sequence: Synthetic oligonucleotide"
tcgagtagattgctgttctaccaagtaatcc

SEQ ID NO: 149 - DNA, 35 bp, Artificial Sequence; identical to SEQ ID NO: 111
  source: /note="Description of Artificial Sequence: Synthetic oligonucleotide"

SEQ ID NO: 150 - DNA, 31 bp, Artificial Sequence
  source: /note="Description of Artificial Sequence: Synthetic oligonucleotide"
gcatgcctgcaggtcgagtagattgctgttc

SEQ ID NO: 151 - DNA, 35 bp, Artificial Sequence; identical to SEQ ID NO: 111
  source: /note="Description of Artificial Sequence: Synthetic oligonucleotide"

SEQ ID NO: 152 - DNA, 31 bp, Artificial Sequence
  source: /note="Description of Artificial Sequence: Synthetic oligonucleotide"
ttacgccaagcttgcatgcctgcaggtcgag

SEQ ID NO: 153 - DNA, 35 bp, Artificial Sequence; identical to SEQ ID NO: 111
  source: /note="Description of Artificial Sequence: Synthetic oligonucleotide"

SEQ ID NO: 154 - DNA, 31 bp, Artificial Sequence
  source: /note="Description of Artificial Sequence: Synthetic oligonucleotide"
gctatgaccatgattacgccaagcttgcatg

SEQ ID NO: 155 - DNA, 35 bp, Artificial Sequence; identical to SEQ ID NO: 111
  source: /note="Description of Artificial Sequence: Synthetic oligonucleotide"

SEQ ID NO: 156 - DNA, 31 bp, Artificial Sequence
  source: /note="Description of Artificial Sequence: Synthetic oligonucleotide"
aatcctcatgtttgaatggccggcgtctatt

SEQ ID NO: 157 - DNA, 35 bp, Artificial Sequence; identical to SEQ ID NO: 111
  source: /note="Description of Artificial Sequence: Synthetic oligonucleotide"

SEQ ID NO: 158 - DNA, 31 bp, Artificial Sequence
  source: /note="Description of Artificial Sequence: Synthetic oligonucleotide"
cttcgacatgggtaatcctcatgtttgaatg

SEQ ID NO: 159 - DNA, 35 bp, Artificial Sequence; identical to SEQ ID NO: 111
  source: /note="Description of Artificial Sequence: Synthetic oligonucleotide"

SEQ ID NO: 160 - DNA, 31 bp, Artificial Sequence
  source: /note="Description of Artificial Sequence: Synthetic oligonucleotide"
acttctttgttgtcttcgacatgggtaatcc

SEQ ID NO: 161 - DNA, 35 bp, Artificial Sequence; identical to SEQ ID NO: 111
  source: /note="Description of Artificial Sequence: Synthetic oligonucleotide"

SEQ ID NO: 162 - DNA, 31 bp, Artificial Sequence
  source: /note="Description of Artificial Sequence: Synthetic oligonucleotide"
cataaagagttgaacttctttgttgtcttcg

SEQ ID NO: 163 - DNA, 35 bp, Artificial Sequence; identical to SEQ ID NO: 111
  source: /note="Description of Artificial Sequence: Synthetic oligonucleotide"

SEQ ID NO: 164 - DNA, 31 bp, Artificial Sequence
  source: /note="Description of Artificial Sequence: Synthetic oligonucleotide"
aggaagatcaatacataaagagttgaacttc

SEQ ID NO: 165 - DNA, 35 bp, Artificial Sequence; identical to SEQ ID NO: 111
  source: /note="Description of Artificial Sequence: Synthetic oligonucleotide"

SEQ ID NO: 166 - DNA, 31 bp, Artificial Sequence
  source: /note="Description of Artificial Sequence: Synthetic oligonucleotide"
gagaaagatcgcgaggaagatcaatacataa

SEQ ID NO: 167 - DNA, 35 bp, Artificial Sequence; identical to SEQ ID NO: 111
  source: /note="Description of Artificial Sequence: Synthetic oligonucleotide"

SEQ ID NO: 168 - DNA, 31 bp, Artificial Sequence
  source: /note="Description of Artificial Sequence: Synthetic oligonucleotide"
agggtgccggtgatgcggcactcgatcttca

SEQ ID NO: 169 - DNA, 35 bp, Artificial Sequence; identical to SEQ ID NO: 111
  source: /note="Description of Artificial Sequence: Synthetic oligonucleotide"

SEQ ID NO: 170 - DNA, 31 bp, Artificial Sequence
  source: /note="Description of Artificial Sequence: Synthetic oligonucleotide"
ccagctcgaactccacgccgttcagggtgcc

SEQ ID NO: 171 - DNA, 35 bp, Artificial Sequence; identical to SEQ ID NO: 111
  source: /note="Description of Artificial Sequence: Synthetic oligonucleotide"

SEQ ID NO: 172 - DNA, 31 bp, Artificial Sequence
  source: /note="Description of Artificial Sequence: Synthetic oligonucleotide"
ccctctccgccgcccaccagctcgaactcca

SEQ ID NO: 173 - DNA, 35 bp, Artificial Sequence; identical to SEQ ID NO: 111
  source: /note="Description of Artificial Sequence: Synthetic oligonucleotide"

SEQ ID NO: 174 - DNA, 31 bp, Artificial Sequence
  source: /note="Description of Artificial Sequence: Synthetic oligonucleotide"
cggccctgctcgggggtgccctctccgccgc

SEQ ID NO: 175 - DNA, 35 bp, Artificial Sequence; identical to SEQ ID NO: 111
  source: /note="Description of Artificial Sequence: Synthetic oligonucleotide"

SEQ ID NO: 176 - DNA, 31 bp, Artificial Sequence
  source: /note="Description of Artificial Sequence: Synthetic oligonucleotide"
acgtggctcagcaggtaggggctgaaggtca

SEQ ID NO: 177 - DNA, 35 bp, Artificial Sequence; identical to SEQ ID NO: 111
  source: /note="Description of Artificial Sequence: Synthetic oligonucleotide"

SEQ ID NO: 178 - DNA, 31 bp, Artificial Sequence
  source: /note="Description of Artificial Sequence: Synthetic oligonucleotide"
aggtgccgaagtggtagaagccgtagcccat

SEQ ID NO: 179 - DNA, 35 bp, Artificial Sequence; identical to SEQ ID NO: 111
  source: /note="Description of Artificial Sequence: Synthetic oligonucleotide"

SEQ ID NO: 180 - DNA, 31 bp, Artificial Sequence
  source: /note="Description of Artificial Sequence: Synthetic oligonucleotide"
tggcgtgcaggaaggggttctcgtagccgct

SEQ ID NO: 181 - DNA, 35 bp, Artificial Sequence; identical to SEQ ID NO: 111
  source: /note="Description of Artificial Sequence: Synthetic oligonucleotide"

SEQ ID NO: 182 - DNA, 31 bp, Artificial Sequence
  source: /note="Description of Artificial Sequence: Synthetic oligonucleotide"
gtacttctcgatgcgggtgttggtgtagccg

SEQ ID NO: 183 - DNA, 35 bp, Artificial Sequence; identical to SEQ ID NO: 111
  source: /note="Description of Artificial Sequence: Synthetic oligonucleotide"

SEQ ID NO: 184 - DNA, 31 bp, Artificial Sequence
  source: /note="Description of Artificial Sequence: Synthetic oligonucleotide"
gcggccggcctcgtagcggtagctgaagctc

SEQ ID NO: 185 - DNA, 35 bp, Artificial Sequence; identical to SEQ ID NO: 111
  source: /note="Description of Artificial Sequence: Synthetic oligonucleotide"

SEQ ID NO: 186 - DNA, 31 bp, Artificial Sequence
  source: /note="Description of Artificial Sequence: Synthetic oligonucleotide"
aagccggtgcccaccaccttgaagtcgccga

SEQ ID NO: 187 - DNA, 35 bp, Artificial Sequence; identical to SEQ ID NO: 111
  source: /note="Description of Artificial Sequence: Synthetic oligonucleotide"

SEQ ID NO: 188 - DNA, 31 bp, Artificial Sequence
  source: /note="Description of Artificial Sequence: Synthetic oligonucleotide"
aagatcacgctgtcctcggggaagccggtgc

SEQ ID NO: 189 - DNA, 36 bp, Artificial Sequence
  source: /note="Description of Artificial Sequence: Synthetic oligonucleotide"
gtttggaagccgggtcgaagtcaggcccgttaagac

SEQ ID NO: 190 - DNA, 31 bp, Artificial Sequence; identical to SEQ ID NO: 51
  source: /note="Description of Artificial Sequence: Synthetic oligonucleotide"

SEQ ID NO: 191 - DNA, 36 bp, Artificial Sequence
  source: /note="Description of Artificial Sequence: Synthetic oligonucleotide"
cttgaagactaaaggaaggaattaatgtcacggtac

SEQ ID NO: 192 - DNA, 31 bp, Artificial Sequence; identical to SEQ ID NO: 51
  source: /note="Description of Artificial Sequence: Synthetic oligonucleotide"

SEQ ID NO: 193 - DNA, 36 bp, Artificial Sequence; identical to SEQ ID NO: 189
  source: /note="Description of Artificial Sequence: Synthetic oligonucleotide"

SEQ ID NO: 194 - DNA, 31 bp, Artificial Sequence; identical to SEQ ID NO: 124
  source: /note="Description of Artificial Sequence: Synthetic oligonucleotide"

SEQ ID NO: 195 - DNA, 36 bp, Artificial Sequence; identical to SEQ ID NO: 191
  source: /note="Description of Artificial Sequence: Synthetic oligonucleotide"

SEQ ID NO: 196 - DNA, 31 bp, Artificial Sequence; identical to SEQ ID NO: 124
  source: /note="Description of Artificial Sequence: Synthetic oligonucleotide"

SEQ ID NO: 197 - DNA, 34 bp, Artificial Sequence
  source: /note="Description of Artificial Sequence: Synthetic oligonucleotide"
gttggaaagccggttttctttgatgtcacggaac

SEQ ID NO: 198 - DNA, 31 bp, Artificial Sequence; identical to SEQ ID NO: 51
  source: /note="Description of Artificial Sequence: Synthetic oligonucleotide"

SEQ ID NO: 199 - DNA, 31 bp, Artificial Sequence
  source: /note="Description of Artificial Sequence: Synthetic oligonucleotide"
ggaaagccggttttctttgatgtcacggaac

SEQ ID NO: 200 - DNA, 31 bp, Artificial Sequence; identical to SEQ ID NO: 51
  source: /note="Description of Artificial Sequence: Synthetic oligonucleotide"

SEQ ID NO: 201 - DNA, 28 bp, Artificial Sequence
  source: /note="Description of Artificial Sequence: Synthetic oligonucleotide"
aagccggttttctttgatgtcacggaac

SEQ ID NO: 202 - DNA, 31 bp, Artificial Sequence; identical to SEQ ID NO: 51
  source: /note="Description of Artificial Sequence: Synthetic oligonucleotide"

SEQ ID NO: 203 - DNA, 25 bp, Artificial Sequence
  source: /note="Description of Artificial Sequence: Synthetic oligonucleotide"
ccggttttctttgatgtcacggaac

SEQ ID NO: 204 - DNA, 31 bp, Artificial Sequence; identical to SEQ ID NO: 51
  source: /note="Description of Artificial Sequence: Synthetic oligonucleotide"

SEQ ID NO: 205 - DNA, 22 bp, Artificial Sequence
  source: /note="Description of Artificial Sequence: Synthetic oligonucleotide"
gttttctttgatgtcacggaac

SEQ ID NO: 206 - DNA, 31 bp, Artificial Sequence; identical to SEQ ID NO: 51
  source: /note="Description of Artificial Sequence: Synthetic oligonucleotide"

SEQ ID NO: 207 - DNA, 18 bp, Artificial Sequence
  source: /note="Description of Artificial Sequence: Synthetic oligonucleotide"
tctttgatgtcacggaac

SEQ ID NO: 208 - DNA, 31 bp, Artificial Sequence; identical to SEQ ID NO: 51
  source: /note="Description of Artificial Sequence: Synthetic oligonucleotide"

SEQ ID NO: 209 - DNA, 15 bp, Artificial Sequence
  source: /note="Description of Artificial Sequence: Synthetic oligonucleotide"
ttgatgtcacggaac

SEQ ID NO: 210 - DNA, 31 bp, Artificial Sequence; identical to SEQ ID NO: 51
  source: /note="Description of Artificial Sequence: Synthetic oligonucleotide"

SEQ ID NO: 211 - DNA, 12 bp, Artificial Sequence
  source: /note="Description of Artificial Sequence: Synthetic oligonucleotide"
atgtcacggaac

SEQ ID NO: 212 - DNA, 31 bp, Artificial Sequence; identical to SEQ ID NO: 51
  source: /note="Description of Artificial Sequence: Synthetic oligonucleotide"

SEQ ID NO: 213 - DNA, 9 bp, Artificial Sequence
  source: /note="Description of Artificial Sequence: Synthetic oligonucleotide"
tcacggaac

SEQ ID NO: 214 - DNA, 31 bp, Artificial Sequence; identical to SEQ ID NO: 51
  source: /note="Description of Artificial Sequence: Synthetic oligonucleotide"

SEQ ID NO: 215 - DNA, 6 bp, Artificial Sequence
  source: /note="Description of Artificial Sequence: Synthetic oligonucleotide"
cggaac

SEQ ID NO: 216 - DNA, 31 bp, Artificial Sequence; identical to SEQ ID NO: 51
  source: /note="Description of Artificial Sequence: Synthetic oligonucleotide"

SEQ ID NO: 217 - DNA, 35 bp, Artificial Sequence; identical to SEQ ID NO: 111
  source: /note="Description of Artificial Sequence: Synthetic oligonucleotide"

SEQ ID NO: 218 - DNA, 30 bp, Artificial Sequence
  source: /note="Description of Artificial Sequence: Synthetic oligonucleotide"
ctttgttgtcttcgacatgggtaatcctca

SEQ ID NO: 219 - DNA, 35 bp, Artificial Sequence; identical to SEQ ID NO: 111
  source: /note="Description of Artificial Sequence: Synthetic oligonucleotide"

SEQ ID NO: 220 - DNA, 28 bp, Artificial Sequence
  source: /note="Description of Artificial Sequence: Synthetic oligonucleotide"
ctttgttgtcttcgacatgggtaatcct

SEQ ID NO: 221 - DNA, 35 bp, Artificial Sequence; identical to SEQ ID NO: 111
  source: /note="Description of Artificial Sequence: Synthetic oligonucleotide"

SEQ ID NO: 222 - DNA, 25 bp, Artificial Sequence
  source: /note="Description of Artificial Sequence: Synthetic oligonucleotide"
ctttgttgtcttcgacatgggtaat

SEQ ID NO: 223 - DNA, 35 bp, Artificial Sequence; identical to SEQ ID NO: 111
  source: /note="Description of Artificial Sequence: Synthetic oligonucleotide"

SEQ ID NO: 224 - DNA, 22 bp, Artificial Sequence
  source: /note="Description of Artificial Sequence: Synthetic oligonucleotide"
ctttgttgtcttcgacatgggt

SEQ ID NO: 225 - DNA, 35 bp, Artificial Sequence; identical to SEQ ID NO: 111
  source: /note="Description of Artificial Sequence: Synthetic oligonucleotide"

SEQ ID NO: 226 - DNA, 19 bp, Artificial Sequence
  source: /note="Description of Artificial Sequence: Synthetic oligonucleotide"
ctttgttgtcttcgacatg

SEQ ID NO: 227 - DNA, 35 bp, Artificial Sequence; identical to SEQ ID NO: 111
  source: /note="Description of Artificial Sequence: Synthetic oligonucleotide"

SEQ ID NO: 228 - DNA, 16 bp, Artificial Sequence
  source: /note="Description of Artificial Sequence: Synthetic oligonucleotide"
ctttgttgtcttcgac

SEQ ID NO: 229 - DNA, 35 bp, Artificial Sequence; identical to SEQ ID NO: 111
  source: /note="Description of Artificial Sequence: Synthetic oligonucleotide"

SEQ ID NO: 230 - DNA, 13 bp, Artificial Sequence
  source: /note="Description of Artificial Sequence: Synthetic oligonucleotide"
ctttgttgtcttc

SEQ ID NO: 231 - DNA, 35 bp, Artificial Sequence; identical to SEQ ID NO: 111
  source: /note="Description of Artificial Sequence: Synthetic oligonucleotide"

SEQ ID NO: 232 - DNA, 10 bp, Artificial Sequence
  source: /note="Description of Artificial Sequence: Synthetic oligonucleotide"
ctttgttgtc

SEQ ID NO: 233 - DNA, 15 bp, Artificial Sequence
  source: /note="Description of Artificial Sequence: Synthetic oligonucleotide"
ttgatgtcacggaac

SEQ ID NO: 234 - DNA, 31 bp, Artificial Sequence; identical to SEQ ID NO: 51
  source: /note="Description of Artificial Sequence: Synthetic oligonucleotide"

SEQ ID NO: 235 - DNA, 15 bp, Artificial Sequence
  source: /note="Description of Artificial Sequence: Synthetic oligonucleotide"
atgatgtcacggaac

SEQ ID NO: 236 - DNA, 31 bp, Artificial Sequence; identical to SEQ ID NO: 51
  source: /note="Description of Artificial Sequence: Synthetic oligonucleotide"

SEQ ID NO: 237 - DNA, 15 bp, Artificial Sequence
  source: /note="Description of Artificial Sequence: Synthetic oligonucleotide"
tagatgtcacggaac

SEQ ID NO: 238 - DNA, 31 bp, Artificial Sequence; identical to SEQ ID NO: 51
  source: /note="Description of Artificial Sequence: Synthetic oligonucleotide"

SEQ ID NO: 239 - DNA, 15 bp, Artificial Sequence
  source: /note="Description of Artificial Sequence: Synthetic oligonucleotide"
ttcatgtcacggaac

SEQ ID NO: 240 - DNA, 31 bp, Artificial Sequence; identical to SEQ ID NO: 51
  source: /note="Description of Artificial Sequence: Synthetic oligonucleotide"

SEQ ID NO: 241 - DNA, 15 bp, Artificial Sequence
  source: /note="Description of Artificial Sequence: Synthetic oligonucleotide"
ttgttgtcacggaac

SEQ ID NO: 242 - DNA, 31 bp, Artificial Sequence; identical to SEQ ID NO: 51
  source: /note="Description of Artificial Sequence: Synthetic oligonucleotide"

SEQ ID NO: 243 - DNA, 15 bp, Artificial Sequence
  source: /note="Description of Artificial Sequence: Synthetic oligonucleotide"
ttgaagtcacggaac

SEQ ID NO: 244 - DNA, 31 bp, Artificial Sequence; identical to SEQ ID NO: 51
  source: /note="Description of Artificial Sequence: Synthetic oligonucleotide"

SEQ ID NO: 245 - DNA, 15 bp, Artificial Sequence
  source: /note="Description of Artificial Sequence: Synthetic oligonucleotide"
ttgatctcacggaac

SEQ ID NO: 246 - DNA, 31 bp, Artificial Sequence; identical to SEQ ID NO: 51
  source: /note="Description of Artificial Sequence: Synthetic oligonucleotide"

SEQ ID NO: 247 - DNA, 15 bp, Artificial Sequence
  source: /note="Description of Artificial Sequence: Synthetic oligonucleotide"
ttgatgacacggaac

SEQ ID NO: 248 - DNA, 31 bp, Artificial Sequence; identical to SEQ ID NO: 51
  source: /note="Description of Artificial Sequence: Synthetic oligonucleotide"

SEQ ID NO: 249 - DNA, 15 bp, Artificial Sequence
  source: /note="Description of Artificial Sequence: Synthetic oligonucleotide"
ttgatgtgacggaac

SEQ ID NO: 250 - DNA, 31 bp, Artificial Sequence; identical to SEQ ID NO: 51
  source: /note="Description of Artificial Sequence: Synthetic oligonucleotide"

SEQ ID NO: 251 - DNA, 15 bp, Artificial Sequence
  source: /note="Description of Artificial Sequence: Synthetic oligonucleotide"
ttgatgtctcggaac

SEQ ID NO: 252 - DNA, 31 bp, Artificial Sequence; identical to SEQ ID NO: 51
  source: /note="Description of Artificial Sequence: Synthetic oligonucleotide"

SEQ ID NO: 253 - DNA, 15 bp, Artificial Sequence
  source: /note="Description of Artificial Sequence: Synthetic oligonucleotide"
ttgatgtcagggaac

SEQ ID NO: 254 - DNA, 31 bp, Artificial Sequence; identical to SEQ ID NO: 51
  source: /note="Description of Artificial Sequence: Synthetic oligonucleotide"

SEQ ID NO: 255 - DNA, 15 bp, Artificial Sequence
  source: /note="Description of Artificial Sequence: Synthetic oligonucleotide"
ttgatgtcaccgaac

SEQ ID NO: 256 - DNA, 31 bp, Artificial Sequence; identical to SEQ ID NO: 51
  source: /note="Description of Artificial Sequence: Synthetic oligonucleotide"

SEQ ID NO: 257 - DNA, 15 bp, Artificial Sequence
  source: /note="Description of Artificial Sequence: Synthetic oligonucleotide"
ttgatgtcacgcaac

SEQ ID NO: 258 - DNA, 31 bp, Artificial Sequence; identical to SEQ ID NO: 51
  source: /note="Description of Artificial Sequence: Synthetic oligonucleotide"

SEQ ID NO: 259 - DNA, 15 bp, Artificial Sequence
  source: /note="Description of Artificial Sequence: Synthetic oligonucleotide"
ttgatgtcacggtac

SEQ ID NO: 260 - DNA, 31 bp, Artificial Sequence; identical to SEQ ID NO: 51
  source: /note="Description of Artificial Sequence: Synthetic oligonucleotide"

SEQ ID NO: 261 - DNA, 15 bp, Artificial Sequence
  source: /note="Description of Artificial Sequence: Synthetic oligonucleotide"
ttgatgtcacggatc

SEQ ID NO: 262 - DNA, 31 bp, Artificial Sequence; identical to SEQ ID NO: 51
  source: /note="Description of Artificial Sequence: Synthetic oligonucleotide"

SEQ ID NO: 263 - DNA, 15 bp, Artificial Sequence
  source: /note="Description of Artificial Sequence: Synthetic oligonucleotide"
ttgatgtcacggaag

SEQ ID NO: 264 - DNA, 31 bp, Artificial Sequence; identical to SEQ ID NO: 51
  source: /note="Description of Artificial Sequence: Synthetic oligonucleotide"

SEQ ID NO: 265 - DNA, 15 bp, Artificial Sequence
  source: /note="Description of Artificial Sequence: Synthetic oligonucleotide"
ttgatgtcacggaac

SEQ ID NO: 266 - DNA, 31 bp, Artificial Sequence; identical to SEQ ID NO: 51
  source: /note="Description of Artificial Sequence: Synthetic oligonucleotide"

SEQ ID NO: 267 - DNA, 15 bp, Artificial Sequence
  source: /note="Description of Artificial Sequence: Synthetic oligonucleotide"
aagatgtcacggaac

SEQ ID NO: 268 - DNA, 31 bp, Artificial Sequence; identical to SEQ ID NO: 51
  source: /note="Description of Artificial Sequence: Synthetic oligonucleotide"

SEQ ID NO: 269 - DNA, 15 bp, Artificial Sequence
  source: /note="Description of Artificial Sequence: Synthetic oligonucleotide"
tacatgtcacggaac

SEQ ID NO: 270 - DNA, 31 bp, Artificial Sequence; identical to SEQ ID NO: 51
  source: /note="Description of Artificial Sequence: Synthetic oligonucleotide"

SEQ ID NO: 271 - DNA, 15 bp, Artificial Sequence
  source: /note="Description of Artificial Sequence: Synthetic oligonucleotide"
ttcttgtcacggaac

SEQ ID NO: 272 - DNA, 31 bp, Artificial Sequence; identical to SEQ ID NO: 51
  source: /note="Description of Artificial Sequence: Synthetic oligonucleotide"

SEQ ID NO: 273 - DNA, 15 bp, Artificial Sequence
  source: /note="Description of Artificial Sequence: Synthetic oligonucleotide"
ttgtagtcacggaac

SEQ ID NO: 274 - DNA, 31 bp, Artificial Sequence; identical to SEQ ID NO: 51
  source: /note="Description of Artificial Sequence: Synthetic oligonucleotide"

SEQ ID NO: 275 - DNA, 15 bp, Artificial Sequence
  source: /note="Description of Artificial Sequence: Synthetic oligonucleotide"
ttgaactcacggaac

SEQ ID NO: 276 - DNA, 31 bp, Artificial Sequence; identical to SEQ ID NO: 51
  source: /note="Description of Artificial Sequence: Synthetic oligonucleotide"

SEQ ID NO: 277 - DNA, 15 bp, Artificial Sequence
  source: /note="Description of Artificial Sequence: Synthetic oligonucleotide"
ttgatcacacggaac

SEQ ID NO: 278 - DNA, 31 bp, Artificial Sequence; identical to SEQ ID NO: 51
  source: /note="Description of Artificial Sequence: Synthetic oligonucleotide"

SEQ ID NO: 279 - DNA, 15 bp, Artificial Sequence
  source: /note="Description of Artificial Sequence: Synthetic oligonucleotide"
ttgatgagacggaac

SEQ ID NO: 280 - DNA, 31 bp, Artificial Sequence; identical to SEQ ID NO: 51
  source: /note="Description of Artificial Sequence: Synthetic oligonucleotide"

SEQ ID NO: 281 - DNA, 15 bp, Artificial Sequence
  source: /note="Description of Artificial Sequence: Synthetic oligonucleotide"
ttgatgtgtcggaac

SEQ ID NO: 282 - DNA, 31 bp, Artificial Sequence; identical to SEQ ID NO: 51
  source: /note="Description of Artificial Sequence: Synthetic oligonucleotide"

SEQ ID NO: 283 - DNA, 15 bp, Artificial Sequence
  source: /note="Description of Artificial Sequence: Synthetic oligonucleotide"
ttgatgtctgggaac

SEQ ID NO: 284 - DNA, 31 bp, Artificial Sequence; identical to SEQ ID NO: 51
  source: /note="Description of Artificial Sequence: Synthetic oligonucleotide"

SEQ ID NO: 285 - DNA, 15 bp, Artificial Sequence
  source: /note="Description of Artificial Sequence: Synthetic oligonucleotide"
ttgatgtcagcgaac

SEQ ID NO: 286 - DNA, 31 bp, Artificial Sequence; identical to SEQ ID NO: 51
  source: /note="Description of Artificial Sequence: Synthetic oligonucleotide"

SEQ ID NO: 287 - DNA, 15 bp, Artificial Sequence
  source: /note="Description of Artificial Sequence: Synthetic oligonucleotide"
ttgatgtcacccaac

SEQ ID NO: 288 - DNA, 31 bp, Artificial Sequence; identical to SEQ ID NO: 51
  source: /note="Description of Artificial Sequence: Synthetic oligonucleotide"

SEQ ID NO: 289 - DNA, 15 bp, Artificial Sequence
  source: /note="Description of Artificial Sequence: Synthetic oligonucleotide"
ttgatgtcacgctac

SEQ ID NO: 290 - DNA, 31 bp, Artificial Sequence; identical to SEQ ID NO: 51
  source: /note="Description of Artificial Sequence: Synthetic oligonucleotide"

SEQ ID NO: 291 - DNA, 15 bp, Artificial Sequence
  source: /note="Description of Artificial Sequence: Synthetic oligonucleotide"
ttgatgtcacggttc

SEQ ID NO: 292 - DNA, 31 bp, Artificial Sequence; identical to SEQ ID NO: 51
  source: /note="Description of Artificial Sequence: Synthetic oligonucleotide"

SEQ ID NO: 293 - DNA, 15 bp, Artificial Sequence
  source: /note="Description of Artificial Sequence: Synthetic oligonucleotide"
ttgatgtcacggatg

SEQ ID NO: 294 - DNA, 31 bp, Artificial Sequence; identical to SEQ ID NO: 51
  source: /note="Description of Artificial Sequence: Synthetic oligonucleotide"

SEQ ID NO: 295 - DNA, 35 bp, Artificial Sequence; identical to SEQ ID NO: 111
  source: /note="Description of Artificial Sequence: Synthetic oligonucleotide"

SEQ ID NO: 296 - DNA, 31 bp, Artificial Sequence
  source: /note="Description of Artificial Sequence: Synthetic oligonucleotide"
accaaacgtaatgcggggtgcatttcgctga

SEQ ID NO: 297 - DNA, 35 bp, Artificial Sequence; identical to SEQ ID NO: 111
  source: /note="Description of Artificial Sequence: Synthetic oligonucleotide"

SEQ ID NO: 298 - DNA, 31 bp, Artificial Sequence
  source: /note="Description of Artificial Sequence: Synthetic oligonucleotide"
gttgaatctgagggtccaccaaacgtaatgc

SEQ ID NO: 299 - DNA, 35 bp, Artificial Sequence; identical to SEQ ID NO: 111
  source: /note="Description of Artificial Sequence: Synthetic oligonucleotide"

SEQ ID NO: 300 - DNA, 31 bp, Artificial Sequence
  source: /note="Description of Artificial Sequence: Synthetic oligonucleotide"
cattctggttactgccagttgaatctgaggg

SEQ ID NO: 301 - DNA, 35 bp, Artificial Sequence; identical to SEQ ID NO: 111
  source: /note="Description of Artificial Sequence: Synthetic oligonucleotide"

SEQ ID NO: 302 - DNA, 31 bp, Artificial Sequence
  source: /note="Description of Artificial Sequence: Synthetic oligonucleotide"
gccccactgcgttctccattctggttactgc

SEQ ID NO: 303 - DNA, 35 bp, Artificial Sequence; identical to SEQ ID NO: 111
  source: /note="Description of Artificial Sequence: Synthetic oligonucleotide"

SEQ ID NO: 304 - DNA, 31 bp, Artificial Sequence
  source: /note="Description of Artificial Sequence: Synthetic oligonucleotide"
acgttgttttgatcgcgccccactgcgttct

SEQ ID NO: 305 - DNA, 35 bp, Artificial Sequence; identical to SEQ ID NO: 111
  source: /note="Description of Artificial Sequence: Synthetic oligonucleotide"

SEQ ID NO: 306 - DNA, 31 bp, Artificial Sequence
  source: /note="Description of Artificial Sequence: Synthetic oligonucleotide"
ggtaaaccttggggccgacgttgttttgatc

SEQ ID NO: 307 - DNA, 35 bp, Artificial Sequence; identical to SEQ ID NO: 111
  source: /note="Description of Artificial Sequence: Synthetic oligonucleotide"

SEQ ID NO: 308 - DNA, 31 bp, Artificial Sequence
  source: /note="Description of Artificial Sequence: Synthetic oligonucleotide"
agacgcagtattattgggtaaaccttggggc

SEQ ID NO: 309 - DNA, 35 bp, Artificial Sequence; identical to SEQ ID NO: 111
  source: /note="Description of Artificial Sequence: Synthetic oligonucleotide"

SEQ ID NO: 310 - DNA, 31 bp, Artificial Sequence
  source: /note="Description of Artificial Sequence: Synthetic oligonucleotide"
tgagagcggtgaaccaagacgcagtattatt

SEQ ID NO: 311 - DNA, 35 bp, Artificial Sequence; identical to SEQ ID NO: 111
  source: /note="Description of Artificial Sequence: Synthetic oligonucleotide"

SEQ ID NO: 312 - DNA, 31 bp, Artificial Sequence
  source: /note="Description of Artificial Sequence: Synthetic oligonucleotide"
ccgggaagtttttgagcgaaaaccagacata

SEQ ID NO: 313 - DNA, 35 bp, Artificial Sequence; identical to SEQ ID NO: 111
  source: /note="Description of Artificial Sequence: Synthetic oligonucleotide"

SEQ ID NO: 314 - DNA, 31 bp, Artificial Sequence
  source: /note="Description of Artificial Sequence: Synthetic oligonucleotide"
cgtgctgttgtcatttccgggaagtttttga

SEQ ID NO: 315 - DNA, 35 bp, Artificial Sequence; identical to SEQ ID NO: 111
  source: /note="Description of Artificial Sequence: Synthetic oligonucleotide"

SEQ ID NO: 316 - DNA, 31 bp, Artificial Sequence
  source: /note="Description of Artificial Sequence: Synthetic oligonucleotide"
caaggcacagcgttgccgtgctgttgtcatt

SEQ ID NO: 317 - DNA, 35 bp, Artificial Sequence; identical to SEQ ID NO: 111
  source: /note="Description of Artificial Sequence: Synthetic oligonucleotide"

SEQ ID NO: 318 - DNA, 31 bp, Artificial Sequence
  source: /note="Description of Artificial Sequence: Synthetic oligonucleotide"
ggtactgcatggtgcccaaggcacagcgttg

SEQ ID NO: 319 - DNA, 35 bp, Artificial Sequence; identical to SEQ ID NO: 111
  source: /note="Description of Artificial Sequence: Synthetic oligonucleotide"

SEQ ID NO: 320 - DNA, 31 bp, Artificial Sequence
  source: /note="Description of Artificial Sequence: Synthetic oligonucleotide"
tcactatcgttccgtttggtactgcatggtg

SEQ ID NO: 321 - DNA, 35 bp, Artificial Sequence; identical to SEQ ID NO: 111
  source: /note="Description of Artificial Sequence: Synthetic oligonucleotide"

SEQ ID NO: 322 - DNA, 31 bp, Artificial Sequence
  source: /note="Description of Artificial Sequence: Synthetic oligonucleotide"
gtcattcgtgattgttttcactatcgttccg

SEQ ID NO: 323 - DNA, 35 bp, Artificial Sequence; identical to SEQ ID NO: 111
  source: /note="Description of Artificial Sequence: Synthetic oligonucleotide"

SEQ ID NO: 324 - DNA, 31 bp, Artificial Sequence
  source: /note="Description of Artificial Sequence: Synthetic oligonucleotide"
agtgacttcaatttggtcattcgtgattgtt

SEQ ID NO: 325 - DNA, 35 bp, Artificial Sequence; identical to SEQ ID NO: 111
  source: /note="Description of Artificial Sequence: Synthetic oligonucleotide"

SEQ ID NO: 326 - DNA, 31 bp, Artificial Sequence
  source: /note="Description of Artificial Sequence: Synthetic oligonucleotide"
accagttcagtagcattagtgacttcaattt

SEQ ID NO: 327 - DNA, 35 bp, Artificial Sequence; identical to SEQ ID NO: 111
  source: /note="Description of Artificial Sequence: Synthetic oligonucleotide"

SEQ ID NO: 328 - DNA, 31 bp, Artificial Sequence
  source: /note="Description of Artificial Sequence: Synthetic oligonucleotide"
tggggtgcaggtgctccacggtggcgttgct

SEQ ID NO: 329 - DNA, 35 bp, Artificial Sequence; identical to SEQ ID NO: 111
  source: /note="Description of Artificial Sequence: Synthetic oligonucleotide"

SEQ ID NO: 330 - DNA, 31 bp, Artificial Sequence
  source: /note="Description of Artificial Sequence: Synthetic oligonucleotide"
aaggtgcgggcgaagctgcccaccagcacgt

SEQ ID NO: 331 - DNA, 35 bp, Artificial Sequence; identical to SEQ ID NO: 111
  source: /note="Description of Artificial Sequence: Synthetic oligonucleotide"

SEQ ID NO: 332 - DNA, 31 bp, Artificial Sequence
  source: /note="Description of Artificial Sequence: Synthetic oligonucleotide"
gtccaccacgaagctgtagtagccgccgtcg

SEQ ID NO: 333 - DNA, 35 bp, Artificial Sequence; identical to SEQ ID NO: 111
  source: /note="Description of Artificial Sequence: Synthetic oligonucleotide"

SEQ ID NO: 334 - DNA, 31 bp, Artificial Sequence
  source: /note="Description of Artificial Sequence: Synthetic oligonucleotide"
tgctggggtggatggcgctcttgaagtgcat

SEQ ID NO: 335 - DNA, 35 bp, Artificial Sequence; identical to SEQ ID NO: 111
  source: /note="Description of Artificial Sequence: Synthetic oligonucleotide"

SEQ ID NO: 336 - DNA, 31 bp, Artificial Sequence
  source: /note="Description of Artificial Sequence: Synthetic oligonucleotide"
ggaaggcgaacatggggcccccgttctgcag

SEQ ID NO: 337 - DNA, 35 bp, Artificial Sequence; identical to SEQ ID NO: 111
  source: /note="Description of Artificial Sequence: Synthetic oligonucleotide"

SEQ ID NO: 338 - DNA, 31 bp, Artificial Sequence; identical to SEQ ID NO: 156
  source: /note="Description of Artificial Sequence: Synthetic oligonucleotide"

SEQ ID NO: 339 - DNA, 35 bp, Artificial Sequence; identical to SEQ ID NO: 111
  source: /note="Description of Artificial Sequence: Synthetic oligonucleotide"

SEQ ID NO: 340 - DNA, 31 bp, Artificial Sequence
  source: /note="Description of Artificial Sequence: Synthetic oligonucleotide"
ggtaatcctcatgtttgaatggccggcgtct

SEQ ID NO: 341 - DNA, 35 bp, Artificial Sequence; identical to SEQ ID NO: 111
  source: /note="Description of Artificial Sequence: Synthetic oligonucleotide"

SEQ ID NO: 342 - DNA, 31 bp, Artificial Sequence
  source: /note="Description of Artificial Sequence: Synthetic oligonucleotide"
atgggtaatcctcatgtttgaatggccggcg

SEQ ID NO: 343 - DNA, 35 bp, Artificial Sequence; identical to SEQ ID NO: 111
  source: /note="Description of Artificial Sequence: Synthetic oligonucleotide"

SEQ ID NO: 344 - DNA, 31 bp, Artificial Sequence
  source: /note="Description of Artificial Sequence: Synthetic oligonucleotide"
gacatgggtaatcctcatgtttgaatggccg

SEQ ID NO: 345 - DNA, 35 bp, Artificial Sequence; identical to SEQ ID NO: 111
  source: /note="Description of Artificial Sequence: Synthetic oligonucleotide"

SEQ ID NO: 346 - DNA, 31 bp, Artificial Sequence; identical to SEQ ID NO: 136
  source: /note="Description of Artificial Sequence: Synthetic oligonucleotide"

SEQ ID NO: 347 - DNA, 35 bp, Artificial Sequence; identical to SEQ ID NO: 111
  source: /note="Description of Artificial Sequence: Synthetic oligonucleotide"

SEQ ID NO: 348 - DNA, 31 bp, Artificial Sequence
  source: /note="Description of Artificial Sequence: Synthetic oligonucleotide"
gtcttcgacatgggtaatcctcatgtttgaa

SEQ ID NO: 349 - DNA, 35 bp, Artificial Sequence; identical to SEQ ID NO: 111
  source: /note="Description of Artificial Sequence: Synthetic oligonucleotide"

SEQ ID NO: 350 - DNA, 31 bp, Artificial Sequence
  source: /note="Description of Artificial Sequence: Synthetic oligonucleotide"
gttgtcttcgacatgggtaatcctcatgttt

SEQ ID NO: 351 - DNA, 35 bp, Artificial Sequence; identical to SEQ ID NO: 111
  source: /note="Description of Artificial Sequence: Synthetic oligonucleotide"

SEQ ID NO: 352 - DNA, 31 bp, Artificial Sequence
  source: /note="Description of Artificial Sequence: Synthetic oligonucleotide"
tttgttgtcttcgacatgggtaatcctcatg

SEQ ID NO: 353 - DNA, 35 bp, Artificial Sequence; identical to SEQ ID NO: 111
  source: /note="Description of Artificial Sequence: Synthetic oligonucleotide"

SEQ ID NO: 354 - DNA, 31 bp, Artificial Sequence
  source: /note="Description of Artificial Sequence: Synthetic oligonucleotide"
ttctttgttgtcttcgacatgggtaatcctc

SEQ ID NO: 355 - DNA, 35 bp, Artificial Sequence; identical to SEQ ID NO: 111
  source: /note="Description of Artificial Sequence: Synthetic oligonucleotide"

SEQ ID NO: 356 - DNA, 31 bp, Artificial Sequence
  source: /note="Description of Artificial Sequence: Synthetic oligonucleotide"
aacttctttgttgtcttcgacatgggtaatc

SEQ ID NO: 357 - DNA, 36 bp, Artificial Sequence; identical to SEQ ID NO: 191
  source: /note="Description of Artificial Sequence: Synthetic oligonucleotide"

SEQ ID NO: 358 - DNA, 31 bp, Artificial Sequence; identical to SEQ ID NO: 156
  source: /note="Description of Artificial Sequence: Synthetic oligonucleotide"

SEQ ID NO: 359 - DNA, 36 bp, Artificial Sequence; identical to SEQ ID NO: 191
  source: /note="Description of Artificial Sequence: Synthetic oligonucleotide"

SEQ ID NO: 360 - DNA, 31 bp, Artificial Sequence; identical to SEQ ID NO: 340
  source: /note="Description of Artificial Sequence: Synthetic oligonucleotide"

SEQ ID NO: 361 - DNA, 36 bp, Artificial Sequence; identical to SEQ ID NO: 191
  source: /note="Description of Artificial Sequence: Synthetic oligonucleotide"

SEQ ID NO: 362 - DNA, 31 bp, Artificial Sequence; identical to SEQ ID NO: 342
  source: /note="Description of Artificial Sequence: Synthetic oligonucleotide"

SEQ ID NO: 363 - DNA, 36 bp, Artificial Sequence; identical to SEQ ID NO: 191
  source: /note="Description of Artificial Sequence: Synthetic oligonucleotide"

SEQ ID NO: 364 - DNA, 31 bp, Artificial Sequence; identical to SEQ ID NO: 344
  source: /note="Description of Artificial Sequence: Synthetic oligonucleotide"

SEQ ID NO: 365 - DNA, 36 bp, Artificial Sequence; identical to SEQ ID NO: 191
  source: /note="Description of Artificial Sequence: Synthetic oligonucleotide"

SEQ ID NO: 366 - DNA, 31 bp, Artificial Sequence; identical to SEQ ID NO: 136
  source: /note="Description of Artificial Sequence: Synthetic oligonucleotide"

SEQ ID NO: 367 - DNA, 36 bp, Artificial Sequence; identical to SEQ ID NO: 191
  source: /note="Description of Artificial Sequence: Synthetic oligonucleotide"

SEQ ID NO: 368 - DNA, 31 bp, Artificial Sequence; identical to SEQ ID NO: 348
  source: /note="Description of Artificial Sequence: Synthetic oligonucleotide"

SEQ ID NO: 369 - DNA, 36 bp, Artificial Sequence; identical to SEQ ID NO: 191
  source: /note="Description of Artificial Sequence: Synthetic oligonucleotide"

SEQ ID NO: 370 - DNA, 31 bp, Artificial Sequence; identical to SEQ ID NO: 350
  source: /note="Description of Artificial Sequence: Synthetic oligonucleotide"

SEQ ID NO: 371 - DNA, 36 bp, Artificial Sequence; identical to SEQ ID NO: 191
  source: /note="Description of Artificial Sequence: Synthetic oligonucleotide"

SEQ ID NO: 372 - DNA, 31 bp, Artificial Sequence; identical to SEQ ID NO: 352
  source: /note="Description of Artificial Sequence: Synthetic oligonucleotide"

SEQ ID NO: 373 - DNA, 36 bp, Artificial Sequence; identical to SEQ ID NO: 191
  source: /note="Description of Artificial Sequence: Synthetic oligonucleotide"

SEQ ID NO: 374 - DNA, 31 bp, Artificial Sequence; identical to SEQ ID NO: 354
  source: /note="Description of Artificial Sequence: Synthetic oligonucleotide"

SEQ ID NO: 375 - DNA, 36 bp, Artificial Sequence; identical to SEQ ID NO: 191
  source: /note="Description of Artificial Sequence: Synthetic oligonucleotide"

SEQ ID NO: 376 - DNA, 31 bp, Artificial Sequence; identical to SEQ ID NO: 356
  source: /note="Description of Artificial Sequence: Synthetic oligonucleotide"

SEQ ID NO: 377 - DNA, 36 bp, Artificial Sequence; identical to SEQ ID NO: 191
  source: /note="Description of Artificial Sequence: Synthetic oligonucleotide"

SEQ ID NO: 378 - DNA, 31 bp, Artificial Sequence
  source: /note="Description of Artificial Sequence: Synthetic oligonucleotide"
ttgaacttctttgttgtcttcgacatgggta

SEQ ID NO: 379 - DNA, 36 bp, Artificial Sequence; identical to SEQ ID NO: 189
  source: /note="Description of Artificial Sequence: Synthetic oligonucleotide"

SEQ ID NO: 380 - DNA, 31 bp, Artificial Sequence
  source: /note="Description of Artificial Sequence: Synthetic oligonucleotide"
aaacgtaatgcggggtgcatttcgctgattt

SEQ ID NO: 381 - DNA, 36 bp, Artificial Sequence; identical to SEQ ID NO: 189
  source: /note="Description of Artificial Sequence: Synthetic oligonucleotide"

SEQ ID NO: 382 - DNA, 31 bp, Artificial Sequence; identical to SEQ ID NO: 296
  source: /note="Description of Artificial Sequence: Synthetic oligonucleotide"

SEQ ID NO: 383 - DNA, 36 bp, Artificial Sequence; identical to SEQ ID NO: 189
  source: /note="Description of Artificial Sequence: Synthetic oligonucleotide"

SEQ ID NO: 384 - DNA, 31 bp, Artificial Sequence
  source: /note="Description of Artificial Sequence: Synthetic oligonucleotide"
tccaccaaacgtaatgcggggtgcatttcgc

SEQ ID NO: 385 - DNA, 36 bp, Artificial Sequence; identical to SEQ ID NO: 189
  source: /note="Description of Artificial Sequence: Synthetic oligonucleotide"

SEQ ID NO: 386 - DNA, 31 bp, Artificial Sequence
  source: /note="Description of Artificial Sequence: Synthetic oligonucleotide"
gggtccaccaaacgtaatgcggggtgcattt

SEQ ID NO: 387 - DNA, 36 bp, Artificial Sequence; identical to SEQ ID NO: 189
  source: /note="Description of Artificial Sequence: Synthetic oligonucleotide"

SEQ ID NO: 388 - DNA, 31 bp, Artificial Sequence
  source: /note="Description of Artificial Sequence: Synthetic oligonucleotide"
tgagggtccaccaaacgtaatgcggggtgca

SEQ ID NO: 389 - DNA, 36 bp, Artificial Sequence; identical to SEQ ID NO: 189
  source: /note="Description of Artificial Sequence: Synthetic oligonucleotide"

SEQ ID NO: 390 - DNA, 31 bp, Artificial Sequence
  source: /note="Description of Artificial Sequence: Synthetic oligonucleotide"
atctgagggtccaccaaacgtaatgcggggt

SEQ ID NO: 391 - DNA, 36 bp, Artificial Sequence; identical to SEQ ID NO: 189
  source: /note="Description of Artificial Sequence: Synthetic oligonucleotide"

SEQ ID NO: 392 - DNA, 31 bp, Artificial Sequence
  source: /note="Description of Artificial Sequence: Synthetic oligonucleotide"
tgaatctgagggtccaccaaacgtaatgcgg

SEQ ID NO: 393 - DNA, 36 bp, Artificial Sequence; identical to SEQ ID NO: 189
  source: /note="Description of Artificial Sequence: Synthetic oligonucleotide"

SEQ ID NO: 394 - DNA, 31 bp, Artificial Sequence
  source: /note="Description of Artificial Sequence: Synthetic oligonucleotide"
agttgaatctgagggtccaccaaacgtaatg

SEQ ID NO: 395 - DNA, 36 bp, Artificial Sequence; identical to SEQ ID NO: 189
  source: /note="Description of Artificial Sequence: Synthetic oligonucleotide"

SEQ ID NO: 396 - DNA, 31 bp, Artificial Sequence
  source: /note="Description of Artificial Sequence: Synthetic oligonucleotide"
gccagttgaatctgagggtccaccaaacgta

SEQ ID NO: 397 - DNA, 36 bp, Artificial Sequence; identical to SEQ ID NO: 189
  source: /note="Description of Artificial Sequence: Synthetic oligonucleotide"

SEQ ID NO: 398 - DNA, 31 bp, Artificial Sequence
  source: /note="Description of Artificial Sequence: Synthetic oligonucleotide"
actgccagttgaatctgagggtccaccaaac

SEQ ID NO: 399 - DNA, 36 bp, Artificial Sequence; identical to SEQ ID NO: 189
  source: /note="Description of Artificial Sequence: Synthetic oligonucleotide"

SEQ ID NO: 400 - DNA, 31 bp, Artificial Sequence
  source: /note="Description of Artificial Sequence: Synthetic oligonucleotide"
gttactgccagttgaatctgagggtccacca

SEQ ID NO: 401 - DNA, 31 bp, Artificial Sequence
  source: /note="Description of Artificial Sequence: Synthetic oligonucleotide"
gcagatcagggcaaacagaactttgactccc

SEQ ID NO: 402 - DNA, 31 bp, Artificial Sequence
  source: /note="Description of Artificial Sequence: Synthetic oligonucleotide"
cgatgttgaagtcttcgttgttctcggtggg

SEQ ID NO: 403 - DNA, 31 bp, Artificial Sequence
  source: /note="Description of Artificial Sequence: Synthetic oligonucleotide"
gcaacttcccgcggtcagcatcgagatccgt

SEQ ID NO: 404 - DNA, 31 bp, Artificial Sequence
  source: /note="Description of Artificial Sequence: Synthetic oligonucleotide"
tgcagccagctttccgggcattggcttccat

SEQ ID NO: 405 - DNA, 31 bp, Artificial Sequence
  source: /note="Description of Artificial Sequence: Synthetic oligonucleotide"
tgaacttcttcatcttgggcgtgcacttgat

SEQ ID NO: 406 - DNA, 31 bp, Artificial Sequence
  source: /note="Description of Artificial Sequence: Synthetic oligonucleotide"
gaatgtcgacgatcgcctcgcctatgccgcc

SEQ ID NO: 407 - DNA, 31 bp, Artificial Sequence
  source: /note="Description of Artificial Sequence: Synthetic oligonucleotide"
atgaactgctccatgggctccaagtccttga

SEQ ID NO: 408 - DNA, 31 bp, Artificial Sequence
  source: /note="Description of Artificial Sequence: Synthetic oligonucleotide"
gcagccagttgtgcagtccacacacagatcg

SEQ ID NO: 409 - DNA, 31 bp, Artificial Sequence
  source: /note="Description of Artificial Sequence: Synthetic oligonucleotide"
gcgttgcggcagccacttcttgagcaggtca

SEQ ID NO: 410 - DNA, 31 bp, Artificial Sequence
  source: /note="Description of Artificial Sequence: Synthetic oligonucleotide"
tgtccacctggccctggatcttgctggcaaa

SEQ ID NO: 411 - DNA, 31 bp, Artificial Sequence
  source: /note="Description of Artificial Sequence: Synthetic oligonucleotide"
ggtaatgcctggcttgtcgacgcatagtctg

SEQ ID NO: 412 - DNA, 31 bp, Artificial Sequence
  source: /note="Description of Artificial Sequence: Synthetic oligonucleotide"
gggaaccttggccgttataaagtctgaccag

SEQ ID NO: 413 - DNA, 31 bp, Artificial Sequence
  source: /note="Description of Artificial Sequence: Synthetic oligonucleotide"
tataatggtgaatatcttcaaatgatttagt

SEQ ID NO: 414 - DNA, 31 bp, Artificial Sequence
  source: /note="Description of Artificial Sequence: Synthetic oligonucleotide"
atgtatagaaggcatcatcaacaccctgtct

SEQ ID NO: 415 - DNA, 31 bp, Artificial Sequence
  source: /note="Description of Artificial Sequence: Synthetic oligonucleotide"
ggttaaaaatttacagattgtgctgagcttg

SEQ ID NO: 416 - DNA, 31 bp, Artificial Sequence
  source: /note="Description of Artificial Sequence: Synthetic oligonucleotide"
gtagatgctctttcctcctgtgccatctccc

SEQ ID NO: 417 - DNA, 31 bp, Artificial Sequence
  source: /note="Description of Artificial Sequence: Synthetic oligonucleotide"
cagtttgaagttctcatcggggaagcgctca

SEQ ID NO: 418 - DNA, 31 bp, Artificial Sequence
  source: /note="Description of Artificial Sequence: Synthetic oligonucleotide"
cagtgttggtaggagtttgttacaaaagtga

SEQ ID NO: 419 - DNA, 31 bp, Artificial Sequence
  source: /note="Description of Artificial Sequence: Synthetic oligonucleotide"
cttggccaagtctgttatgttcacctgaaaa

SEQ ID NO: 420 - DNA, 31 bp, Artificial Sequence
  source: /note="Description of Artificial Sequence: Synthetic oligonucleotide"
caaaatgtactcagcttcaatcacaaatacg

SEQ ID NO: 421 - DNA, 31 bp, Artificial Sequence
  source: /note="Description of Artificial Sequence: Synthetic oligonucleotide"
ggttatagcttgacaagcaattaactttaaa

SEQ ID NO: 422 - DNA, 31 bp, Artificial Sequence
  source: /note="Description of Artificial Sequence: Synthetic oligonucleotide"
atgataatgcaatagcaggacaggatgacaa

SEQ ID NO: 423 - DNA, 31 bp, Artificial Sequence; identical to SEQ ID NO: 411
  source: /note="Description of Artificial Sequence: Synthetic oligonucleotide"

SEQ ID NO: 424 - DNA, 31 bp, Artificial Sequence; identical to SEQ ID NO: 412
  source: /note="Description of Artificial Sequence: Synthetic oligonucleotide"

SEQ ID NO: 425 - DNA, 50 bp, Artificial Sequence
  source: /note="Description of Artificial Sequence: Synthetic oligonucleotide"
catcctgcggcctctactctgcattcaattacatactgacacattcggca

SEQ ID NO: 426 - DNA, 50 bp, Artificial Sequence
  source: /note="Description of Artificial Sequence: Synthetic oligonucleotide"
accatcctgcggcctctactctgcattcaattacatactgacacattcgg

SEQ ID NO: 427 - DNA, 50 bp, Artificial Sequence
  source: /note="Description of Artificial Sequence: Synthetic oligonucleotide"
aaaccatcctgcggcctctactctgcattcaattacatactgacacattc

SEQ ID NO: 428 - DNA, 50 bp, Artificial Sequence
  source: /note="Description of Artificial Sequence: Synthetic oligonucleotide"
ctaaaccatcctgcggcctctactctgcattcaattacatactgacacat

SEQ ID NO: 429 - DNA, 50 bp, Artificial Sequence
  source: /note="Description of Artificial Sequence: Synthetic oligonucleotide"
ttctaaaccatcctgcggcctctactctgcattcaattacatactgacac

SEQ ID NO: 430 - DNA, 50 bp, Artificial Sequence
  source: /note="Description of Artificial Sequence: Synthetic oligonucleotide"
tgttctaaaccatcctgcggcctctactctgcattcaattacatactgac

SEQ ID NO: 431 - DNA, 50 bp, Artificial Sequence
  source: /note="Description of Artificial Sequence: Synthetic oligonucleotide"
aatgttctaaaccatcctgcggcctctactctgcattcaattacatactg

SEQ ID NO: 432 - DNA, 50 bp, Artificial Sequence
  source: /note="Description of Artificial Sequence: Synthetic oligonucleotide"
agaatgttctaaaccatcctgcggcctctactctgcattcaattacatac

SEQ ID NO: 433 - DNA, 50 bp, Artificial Sequence
  source: /note="Description of Artificial Sequence: Synthetic oligonucleotide"
atagaatgttctaaaccatcctgcggcctctactctgcattcaattacat

SEQ ID NO: 434 - DNA, 50 bp, Artificial Sequence
  source: /note="Description of Artificial Sequence: Synthetic oligonucleotide"
ccatagaatgttctaaaccatcctgcggcctctactctgcattcaattac

SEQ ID NO: 435 - DNA, 50 bp, Artificial Sequence
  source: /note="Description of Artificial Sequence: Synthetic oligonucleotide"
ttccatagaatgttctaaaccatcctgcggcctctactctgcattcaatt

SEQ ID NO: 436 - DNA, 50 bp, Artificial Sequence
  source: /note="Description of Artificial Sequence: Synthetic oligonucleotide"
ctttccatagaatgttctaaaccatcctgcggcctctactctgcattcaa

SEQ ID NO: 437 - DNA, 50 bp, Artificial Sequence
  source: /note="Description of Artificial Sequence: Synthetic oligonucleotide"
ctctttccatagaatgttctaaaccatcctgcggcctctactctgcattc

SEQ ID NO: 438 - DNA, 50 bp, Artificial Sequence
  source: /note="Description of Artificial Sequence: Synthetic oligonucleotide"
atctctttccatagaatgttctaaaccatcctgcggcctctactctgcat

SEQ ID NO: 439 - DNA, 50 bp, Artificial Sequence
  source: /note="Description of Artificial Sequence: Synthetic oligonucleotide"
gaatctctttccatagaatgttctaaaccatcctgcggcctctactctgc

SEQ ID NO: 440 - DNA, 50 bp, Artificial Sequence
  source: /note="Description of Artificial Sequence: Synthetic oligonucleotide"
tggaatctctttccatagaatgttctaaaccatcctgcggcctctactct

SEQ ID NO: 441 - DNA, 50 bp, Artificial Sequence
  source: /note="Description of Artificial Sequence: Synthetic oligonucleotide"
actggaatctctttccatagaatgttctaaaccatcctgcggcctctact

SEQ ID NO: 442 - DNA, 50 bp, Artificial Sequence
  source: /note="Description of Artificial Sequence: Synthetic oligonucleotide"
gaactggaatctctttccatagaatgttctaaaccatcctgcggcctcta

SEQ ID NO: 443 - DNA, 50 bp, Artificial Sequence
  source: /note="Description of Artificial Sequence: Synthetic oligonucleotide"
tggaactggaatctctttccatagaatgttctaaaccatcctgcggcctc

SEQ ID NO: 444 - DNA, 50 bp, Artificial Sequence
  source: /note="Description of Artificial Sequence: Synthetic oligonucleotide"
cctggaactggaatctctttccatagaatgttctaaaccatcctgcggcc

SEQ ID NO: 445 - DNA, 50 bp, Artificial Sequence
  source: /note="Description of Artificial Sequence: Synthetic oligonucleotide"
ttcctggaactggaatctctttccatagaatgttctaaaccatcctgcgg

SEQ ID NO: 446 - DNA, 50 bp, Artificial Sequence
  source: /note="Description of Artificial Sequence: Synthetic oligonucleotide"
ggttcctggaactggaatctctttccatagaatgttctaaaccatcctgc

SEQ ID NO: 447 - DNA, 28 bp, Artificial Sequence
  source: /note="Description of Artificial Sequence: Synthetic oligonucleotide"
acccaggaatctcaggaatgtcgacgat

SEQ ID NO: 448 - DNA, 30 bp, Artificial Sequence
  source: /note="Description of Artificial Sequence: Synthetic oligonucleotide"
gggcattggcttccatctctttgagcacct

SEQ ID NO: 449 - DNA, 28 bp, Artificial Sequence
  source: /note="Description of Artificial Sequence: Synthetic oligonucleotide"
acccaggaatctcaggaatgtcgacgat

SEQ ID NO: 450 - DNA, 48 bp, Artificial Sequence
  source: /note="Description of Artificial Sequence: Synthetic oligonucleotide"
aaagttctgtttgccctgatcctcgaggatcagggcaaacagaacttt

SEQ ID NO: 451 - protein, 45 aa, Unknown
  source: /note="Description of Unknown: Candidatus Poribacteria bacterium sequence"
RDMATSAHTTIDKETKRTKENHLINLEVVRIEDNRYLKGSVEMIN

SEQ ID NO: 452 - protein, 44 aa, Unknown
  source: /note="Description of Unknown: Methanomicrobia archaeon sequence"
DQVRTSAHNKINRATGRVEKDLLFSYELGANTVPLEGTIERVNP

SEQ ID NO: 453 - protein, 44 aa, Unknown
  source: /note="Description of Unknown: Methanophagales archaeon sequence"
DMVRTSTHNKISRATGRVEKDHLFSYELGANTTPFEGMIEPVNH

SEQ ID NO: 454 - protein, 43 aa, Unknown
  source: /note="Description of Unknown: Deltaproteobacteria bacterium sequence"
GTTRVSLHNRVDPTTGRVPEETFFSFEVGSAEKFTGRIERSGP

SEQ ID NO: 455 - protein, 43 aa, Unknown
  source: /note="Description of Unknown: Firmicutes bacterium sequence"
EPIRISTHNRIDPATGRVPKDLLFTFEMGSPAVFRGYIERIGI

SEQ ID NO: 456 - protein, 44 aa, Unknown
  source: /note="Description of Unknown: Ktedonosporobacter rubrisoli sequence"
LQTFLYTQARLDRPTRTAVPGALYSSEFGLREITFKGSVTGWLE

SEQ ID NO: 457 - protein, 44 aa, Unknown
  source: /note="Description of Unknown: Chloroflexi bacterium sequence"
NQKDVYTQVRLDRPTRTAVEGALYTSEFGTRGLTFHGDITGSLT

SEQ ID NO: 458 - protein, 44 aa, Unknown
  source: /note="Description of Unknown: ANME-2 cluster archaeon sequence"
LFLNTRTGTKIDRRTGTVQEDHLFTTESGIKGITLTSKIYGRGN

SEQ ID NO: 459 - protein, 44 aa, Unknown
  source: /note="Description of Unknown: Anaerolineaceae bacterium sequence"
YGQSIRSNNRIDPKTRTAANDHLFFTECVDPDTYFIGEIRSSSN

SEQ ID NO: 460 - protein, 44 aa, Unknown
  source: /note="Description of Unknown: Ornatilinea apprima sequence"
YGRLLRTGIGIDRKLRVVVPDRLFTNECVGTKIPFTGRIIGEFP

SEQ ID NO: 461 - protein, 44 aa, Unknown
  source: /note="Description of Unknown: HreCas7-11 sequence"
EIAVSRVVNRVDPNSGKAKDFFRVWEIDHKLCPNFLGKMSISLS

SEQ ID NO: 462 - protein, 44 aa, Unknown
  source: /note="Description of Unknown: CmaCas7-11 sequence"
DIVQKRILNRVDQTCGKAKDFFKVCEVDHIACPTLNGIIRINDE

SEQ ID NO: 463 - protein, 42 aa, Unknown
  source: /note="Description of Unknown: HvmCas7-11 sequence"
ETAIERIVNRVDPSSGKAKDYMRIWEIDPLVCSQFNGIITIN

SEQ ID NO: 464 - protein, 42 aa, Unknown
  source: /note="Description of Unknown: SmCas7-11 sequence"
EIGSRRTINRVDDETGKAHDFFSIWEVDAVREFQGEIVLAAD

SEQ ID NO: 465 - protein, 42 aa, Unknown
  source: /note="Description of Unknown: OmCas7-11 sequence"
EIGRLRTLNRIDRLTTKAQDFFRIYEVDQVRDFFGTITLAGD

SEQ ID NO: 466 - protein, 44 aa, Unknown
  source: /note="Description of Unknown: DisCas7-11 sequence"
AIGSQRVLNRVDFKSGKAHDFFKAYEVDHTRFPRFEGEITIDNK

SEQ ID NO: 467 - protein, 44 aa, Unknown
  source: /note="Description of Unknown: DsbaCas7-11 sequence"
EIAVRRVVNRVDYASGKAHDFFRIFEVDHIAFPCFHGEIAFGEN

SEQ ID NO: 468 - protein, 44 aa, Unknown
  source: /note="Description of Unknown: SstCas7-11 sequence"
DIGTQRTLNRVDYATGKAHDFFKVWEIDHSLLSVFQGKISIADN

SEQ ID NO: 469 - protein, 44 aa, Unknown
  source: /note="Description of Unknown: CsbCas7-11 sequence"
DIASGRILNRVDFDTGKAKDYFRTWEADYETYGTYTGRITLRNE

SEQ ID NO: 470 - protein, 44 aa, Unknown
  source: /note="Description of Unknown: CjcCas7-11 sequence"
DIASERILNRVDYTTGKAHDYFKVWEVDDDQWWQFTGTITMHDD

SEQ ID NO: 471 - protein, 44 aa, Unknown
  source: /note="Description of Unknown: CbfCas7-11 sequence"
DVCKERVLNRVDFRTGKAQDYFRVFEIDHEDWGVYTGEITITEP

SEQ ID NO: 472 - protein, 44 aa, Unknown
  source: /note="Description of Unknown: HvsCas7-11 sequence"
ELAPKRALNRIEQYTGKAQDYFTVYEALNKEFWTFKGRIRIKED

SEQ ID NO: 473 - protein, 44 aa, Unknown
  source: /note="Description of Unknown: HsmCas7-11 sequence"
EIGIRRILNRVDFTTGKAQDYFYVWEVEHSMCPKFQGTVKINED

SEQ ID NO: 474 - protein, 42 aa, Unknown
  source: /note="Description of Unknown: FmCas7-11 sequence"
DIAQKRTSNRVDFFSKKAHDHYGVWEVTAVKNLLGYIYISDA

SEQ ID NO: 475 - protein, 44 aa, Unknown
  source: /note="Description of Unknown: DpbaCas7-11 sequence"
QKIRPRILNRMDPGTSKARDYFRVFEIENQLCSQFRGWIWLSGD

SEQ ID NO: 476 - protein, 30 aa, Unknown
  source: /note="Description of Unknown: WmCas7x3 sequence"
QRITPDAPDADPYWQADIALDADGRPYLPG

SEQ ID NO: 477 - protein, 35 aa, Unknown
  source: /note="Description of Unknown: NisCas7x3 sequence"
EEMDKQSGESVDKKQNNSWIQAIALDLNKKPYIPG

SEQ ID NO: 478 - protein, 28 aa, Unknown
  source: /note="Description of Unknown: GwCas7x3 sequence"
EKERDENKETRWLEAVALDHKGQPYIPG

SEQ ID NO: 479 - protein, 32 aa, Unknown
  source: /note="Description of Unknown: HvmCas7x3 sequence"
VTRPELTVADRDELVDINAVVTDYTGKPYLPG

SEQ ID NO: 480 - protein, 35 aa, Unknown
  source: /note="Description of Unknown: DsbCas7x3 sequence"
TDRPGLEIEQKDGSKVKAEINAFIKDSNGKPYLPG

SEQ ID NO: 481 - protein, 32 aa, Unknown
  source: /note="Description of Unknown: GamCas7x3 sequence"
IPVTIKDTQGKNREVEVNSVITGKAALPIIPG

SEQ ID NO: 482 - protein, 31 aa, Unknown
  source: /note="Description of Unknown: DesCas7x3 sequence"
VEHDLIKNDDGTPVQINALITGAGGLPIIPG

SEQ ID NO: 483 - protein, 32 aa, Unknown
  source: /note="Description of Unknown: GabCas7x3 sequence"
AEIEINDSQGDRRQVQANAIIRGKDDKPIIPG

SEQ ID NO: 484 - protein, 31 aa, Unknown
  source: /note="Description of Unknown: MetCas7x3 sequence"
CEHDDVKNNDGEPVKINACIKGSKGRPIIPG

SEQ ID NO: 485 - protein, 31 aa, Unknown
  source: /note="Description of Unknown: MebCas7x3 sequence"
CYRPELTNADQKPVDINACIKGANNLPIIPG

SEQ ID NO: 486 - protein, 29 aa, Unknown
  source: /note="Description of Unknown: GwCas7-11 sequence"
EGQKQTDDQAESLHLRTLRDGHGRFRIPF

SEQ ID NO: 487 - protein, 21 aa, Unknown
  source: /note="Description of Unknown: HreCas7-11 sequence"
SEGQTSQAIILCPDGSYRLPR

SEQ ID NO: 488 - protein, 21 aa, Unknown
  source: /note="Description of Unknown: CmaCas7-11 sequence"
KTSHTRSTIFLNMNGQFCIPR

SEQ ID NO: 489 - protein, 21 aa, Unknown
  source: /note="Description of Unknown: HvmCas7-11 sequence"
QEGQTSATILLNRDGYFRLPR

SEQ ID NO: 490 - protein, 23 aa, Unknown
  source: /note="Description of Unknown: SmCas7-11 sequence"
PIDDDQTSSRTLVDRDGRYRLPR

SEQ ID NO: 491 - protein, 22 aa, Unknown
  source: /note="Description of Unknown: OmCas7-11 sequence"
GSHDHTSRKILLTRDFYYRLPR

SEQ ID NO: 492 - protein, 22 aa, Unknown
  source: /note="Description of Unknown: DisCas7-11 sequence"
EDAKQTDLQVLLTPDNKYRLPR

SEQ ID NO: 493 - protein, 22 aa, Unknown
  source: /note="Description of Unknown: DsbaCas7-11 sequence"
KEKKQTDLMLLLDGQNHYRIPR

SEQ ID NO: 494 - protein, 22 aa, Unknown
  source: /note="Description of Unknown: SstCas7-11 sequence"
EDAKHTNLKVLLDRQNRYRLPR

SEQ ID NO: 495 - protein, 22 aa, Unknown
  source: /note="Description of Unknown: SybCas7-11 sequence"
GAGGHTDLSILLGKDGHYRVPR

SEQ ID NO: 496 - protein, 37 aa, Unknown
  source: /note="Description of Unknown: CsbCas7-11 sequence"
SDSIPGKEKKSEDSLVINEHTSFNILLDKENRYRIPR

SEQ ID NO: 497 - protein, 43 aa, Unknown
  source: /note="Description of Unknown: CjcCas7-11 sequence"
FDSTQDDLDLVPDIVNTDEKLEANEQTSFRILMDKKGRYRIPR

SEQ ID NO: 498 - protein, 25 aa, Unknown
  source: /note="Description of Unknown: CbfCas7-11 sequence"
EQTEEVEHTSLRLVMDKKGRFRIPR

SEQ ID NO: 499 - protein, 21 aa, Unknown
  source: /note="Description of Unknown: HvsCas7-11 sequence"
DEEKAEGAILLTPDNRFRLPR

SEQ ID NO: 500 - protein, 22 aa, Unknown
  source: /note="Description of Unknown: HsmCas7-11 sequence"
KTEEQIDMQILLTKDGRYRLPR

SEQ ID NO: 501 - protein, 22 aa, Unknown
  source: /note="Description of Unknown: FmCas7-11 sequence"
QAGKQTSMPTLQDSNDHFRLPR

SEQ ID NO: 502 - protein, 22 aa, Unknown
  source: /note="Description of Unknown: DpbaCas7-11 sequence"
ATETHTDLPILLTSDRHFRIPR

SEQ ID NO: 503 - protein, 33 aa, Unknown
  source: /note="Description of Unknown: WmCas7x3 sequence"
HRKPQDNAPDGTPRQRGDRALLPGASLRGRLRS

SEQ ID NO: 504 - protein, 34 aa, Unknown
  source: /note="Description of Unknown: NisCas7x3 sequence"
KKDEAKNEADAKPRTNHQGQVILPASSLRGRLRA

SEQ ID NO: 505 - protein, 30 aa, Unknown
  source: /note="Description of Unknown: GwCas7x3 sequence"
KADDADAVPRRTHDDKIVLPASSLRGRLRT

SEQ ID NO: 506 - protein, 34 aa, Unknown
  source: /note="Description of Unknown: HvmCas7x3 sequence"
KKKRRSNTPNLRPLRDAIGRPCLPESSVRGALRA

SEQ ID NO: 507 - protein, 32 aa, Unknown
  source: /note="Description of Unknown: DsbCas7x3 sequence"
KKRKEDIDHQPLRDSAGNARLPAKSIRGAMRS

SEQ ID NO: 508 - protein, 34 aa, Unknown
  source: /note="Description of Unknown: GamCas7x3 sequence"
DKCKAEDTPDIYPLEEKNGVPAFPVRSFRGAIRS

SEQ ID NO: 509 - protein, 34 aa, Unknown
  source: /note="Description of Unknown: DesCas7x3 sequence"
NTPDITQAPDMVPLVDEDGNPMLPASSFRGALRA

SEQ ID NO: 510 - protein, 34 aa, Unknown
  source: /note="Description of Unknown: GabCas7x3 sequence"
SKGDGDQPAVHQPLTDRSNNPILPARSFRGAIRA

SEQ ID NO: 511 - protein, 34 aa, Unknown
  source: /note="Description of Unknown: MetCas7x3 sequence"
LSSNENAKTDHYPLLDKNRNPYLPVSSFRGVLRS

SEQ ID NO: 512 - protein, 34 aa, Unknown
  source: /note="Description of Unknown: MebCas7x3 sequence"
LEADPKTKIDHYPLLDNHKKPRLPSASIRGVLRS

SEQ ID NO: 513 - protein, 48 aa, Unknown
  source: /note="Description of Unknown: GwCas7-11 sequence"
ESDAPDNVAYKKPVVQYDETGRLRTTDPGPVEMLTCLKGEGVRGVVAY

SEQ ID NO: 514 - protein, 42 aa, Unknown
  source: /note="Description of Unknown: HreCas7-11 sequence"
DHDNKDAVMVQKTVLFVDESGNYSQMPHHFLKGSGIRGACRF

SEQ ID NO: 515 - protein, 47 aa, Unknown
  source: /note="Description of Unknown: CmaCas7-11 sequence"
DNRNPDAVMVKKTILVYEQDSSTHKNVPKEVPKYFIKSETIRGLLRS

SEQ ID NO: 516 - protein, 44 aa, Unknown
  source: /note="Description of Unknown: HvmCas7-11 sequence"
DPRNTDAIMVRKTVFCPDPNAKNRPAPATVYMIKGESIRGILRS

SEQ ID NO: 517 - protein, 37 aa, Unknown
  source: /note="Description of Unknown: SmCas7-11 sequence"
NSDTADIISFRRTVVDNGEVLREPVLRGEGLRGLLRT

SEQ ID NO: 518 - protein, 37 aa, Unknown
  source: /note="Description of Unknown: OmCas7-11 sequence"
RHEEDSVYFQKRIFTSDGRVVLVPALRGEGLRGLLRT

SEQ ID NO: 519 - protein, 37 aa, Unknown
  source: /note="Description of Unknown: DisCas7-11 sequence"
DKRGTDVVTFVKYKAEGEEAKPVCAYKAESFRGVIRS

SEQ ID NO: 520 - protein, 35 aa, Unknown
  source: /note="Description of Unknown: DsbaCas7-11 sequence"
TEDVADIVSFKKYTQGGEKIIYAYKSESFRGVVRT

SEQ ID NO: 521 - protein, 35 aa, Unknown
  source: /note="Description of Unknown: SstCas7-11 sequence"
EKDGSDIVSFRKYADDSGKEVYAYKAESFRGVVRA

SEQ ID NO: 522 - protein, 39 aa, Unknown
  source: /note="Description of Unknown: SybCas7-11 sequence"
ERIGFDNIAYEKRRYNGETNTTESIPAVKGETFRGIVRT

SEQ ID NO: 523 - protein, 41 aa, Unknown
  source: /note="Description of Unknown: CsbCas7-11 sequence"
EPGNRDAIAYKKRVYNDGNNAIEPEPRFAVKSETHRGIFRT

SEQ ID NO: 524 - protein, 37 aa, Unknown
  source: /note="Description of Unknown: CjcCas7-11 sequence"
NKDNIDCIAYEKRKWENGGIKFVPTIKGETIRGIVRM

SEQ ID NO: 525 - protein, 37 aa, Unknown
  source: /note="Description of Unknown: CbfCas7-11 sequence"
DPNNVDAIVFEKMKLDGDQVKYLPAIKGETIRGIVRT

SEQ ID NO: 526 - protein, 37 aa, Unknown
  source: /note="Description of Unknown: HvsCas7-11 sequence"
EGKAPDAVFFKKYVFENGKIEEKPCFKAESIRGIFRT

SEQ ID NO: 527 - protein, 35 aa, Unknown
  source: /note="Description of Unknown: HsmCas7-11 sequence"
DSSNTDLVTFKKYKLEESKEVFAIKGESIRGVFRT

SEQ ID NO: 528 - protein, 38 aa, Unknown
  source: /note="Description of Unknown: FmCas7-11 sequence"
HGNTDSVFYKKPILKSGEKEPSYQWAIKSDTVRGLIRS

SEQ ID NO: 529 - protein, 34 aa, Unknown
  source: /note="Description of Unknown: DpbaCas7-11 sequence"
RNESDAVFYQKSVAGEKGPVYALKGEGLRGIVSS

SEQ ID NO: 530 - protein, 43 aa, Unknown
  source: /note="Description of Unknown: WmCas7x3 sequence"
PATLVDHDMLAIDRFTGGGKDGAKFKLRYAECPTLEGQLSLDL

SEQ ID NO: 531 - protein, 43 aa, Unknown
  source: /note="Description of Unknown: NisCas7x3 sequence"
LATLTRHEMVAIDRFTGGGKEGAKFNVDYIECPTLTGAIYLDL

SEQ ID NO: 532 - protein, 43 aa, Unknown
  source: /note="Description of Unknown: GwCas7x3 sequence"
SIKTRRHEMLAIDRFTGGGKDGAKFNVDYVECPTLAGKLSLDL

SEQ ID NO: 533 - protein, 43 aa, Unknown
  source: /note="Description of Unknown: HvmCas7x3 sequence"
EDCDNIQEFVAIDRFTGGAKDKAKFNAEYIGSPRFTGTIALDK

SEQ ID NO: 534 - protein, 43 aa, Unknown
  source: /note="Description of Unknown: DsbCas7x3 sequence"
TRQETVQDFVAIDRFHGGGKETAKFDASFSWRPQYSILMHIPS

SEQ ID NO: 535 - protein, 43 aa, Unknown
  source: /note="Description of Unknown: GamCas7x3 sequence"
LKPFIIQEFVAIDRFHGGGKDEAKFNAAHYQAPVFKGKVRVSQ

SEQ ID NO: 536 - protein, 43 aa, Unknown
  source: /note="Description of Unknown: DesCas7x3 sequence"
FRREQEQTFVAIDRFHGGCKEGALYTIRHAESPRFEGHLVIDP

SEQ ID NO: 537 - protein, 43 aa, Unknown
  source: /note="Description of Unknown: GabCas7x3 sequence"
YRPAKTQQFVAIDRFHGGGKDGALFSIKYFERPVLKGGISLKL

SEQ ID NO: 538 - protein, 43 aa, Unknown
  source: /note="Description of Unknown: MetCas7x3 sequence"
KSKKTKQDFVAIDRFHGGGKDGAKFDATHFERPEFEGAISFSP

SEQ ID NO: 539 - protein, 43 aa, Unknown
  source: /note="Description of Unknown: MebCas7x3 sequence"
ANELKTQEFIAIDRFHGGGKDGAKFNAKHSERPYFQGRITLSP

SEQ ID NO: 540 - protein, 47 aa, Unknown
  source: /note="Description of Unknown: GwCas7-11 sequence"
TPHAMRSDRVALDVFGGAMPEAKFDDRPLAASPGKPLNFKSTIWYRE

SEQ ID NO: 541 - protein, 48 aa, Unknown
  source: /note="Description of Unknown: HreCas7-11 sequence"
EVEAIKCDHVAIDRFHGGTVHRMKYDDYPLPGSPNRPLRIKGNIWVKR

SEQ ID NO: 542 - protein, 48 aa, Unknown
  source: /note="Description of Unknown: CmaCas7-11 sequence"
NVSDCCIDHVAIDRFTGGGVEKMKFNDYPLSASPKNCLNLKGSIWITS

SEQ ID NO: 543 - protein, 48 aa, Unknown
  source: /note="Description of Unknown: HvmCas7-11 sequence"
SVSDKKMDHVAIDRFTGGGVDQMKFDDYPLPGCPAQPLILEGKFWVKD

SEQ ID NO: 544 - protein, 46 aa, Unknown
  source: /note="Description of Unknown: SmCas7-11 sequence"
TVADKRLDHVAIDRFDQSVVEKYDDRPLVGSPKQPLVFKGCFWVQT

SEQ ID NO: 545 - protein, 46 aa, Unknown
  source: /note="Description of Unknown: OmCas7-11 sequence"
TWNDKKIDHVSCSRFDASVVNKFDDRSLVGSPDSPLHFEGTFWLHR

SEQ ID NO: 546 - protein, 48 aa, Unknown
  source: /note="Description of Unknown: DisCas7-11 sequence"
DPEPVTFDHVAIDRFTGGAADKKKFDDSPLPGSPARPLMLKGSFWIRR

SEQ ID NO: 547 - protein, 48 aa, Unknown
  source: /note="Description of Unknown: DsbaCas7-11 sequence"
EPEPRRFDHVAIDRFTGGAVNQKKFDDRSLVPGKEGFMTLIGCFWMRK

SEQ ID NO: 548 - protein, 48 aa, Unknown
  source: /note="Description of Unknown: SstCas7-11 sequence"
QPEPMIFDHVAIDRFTGGAVDKKKFDDCSLPGTPGHPLTLKGCFWIRK

SEQ ID NO: 549 - protein, 48 aa, Unknown
  source: /note="Description of Unknown: SybCas7-11 sequence"
AWTRKHLDHVAIDRFHGGAEENMKFDTYALAASPTNPLRMKGLIWVRS

SEQ ID NO: 550 - protein, 48 aa, Unknown
  source: /note="Description of Unknown: CsbCas7-11 sequence"
EKLEKHIDHVAIDRFTGGALDKAKFDTYPLAGSPKKPLKLKGRFWIKK

SEQ ID NO: 551 - protein, 48 aa, Unknown
  source: /note="Description of Unknown: CjcCas7-11 sequence"
SYKKKLIDHVAIDRFHGGAEDKMKFNTLPLAGSFEKPIILKGRFWIKK

SEQ ID NO: 552 - protein, 48 aa, Unknown
  source: /note="Description of Unknown: CbfCas7-11 sequence"
KDIAKKIDHVAIDRFTGGARDQMKFDTLPLIGSPERPLRLKGLFWMRR

SEQ ID NO: 553 - protein, 48 aa, Unknown
  source: /note="Description of Unknown: HvsCas7-11 sequence"
GQEEKFFDHVAIDRFLGGAKEKYKFDDKPIIGAPDTPIVLEGKIWVKK

SEQ ID NO: 554 - protein, 48 aa, Unknown
  source: /note="Description of Unknown: HsmCas7-11 sequence"
DSAPKRLDHVAIDRFTGGAKEQAKFDDSPLIGSPDSPLEFTGIVWVRD

SEQ ID NO: 555 - protein, 48 aa, Unknown
  source: /note="Description of Unknown: FmCas7-11 sequence"
EIKTYRMDHVAIDRISGGAVDQCKYDDEPLVGTSKHPLVFKGMFWINR

SEQ ID NO: 556 - protein, 45 aa, Unknown
  source: /note="Description of Unknown: DpbaCas7-11 sequence"
EVREKLFDHVSIDRFTGGAANKLKFDDKPLVGNPLVFQGVFWVHQ

SEQ ID NO: 557 - protein, 48 aa, Unknown
  source: /note="Description of Unknown: WmCas7x3 sequence"
PVAGFALQNQPAIPATSLRGLLSSLFESISGSNLRVLHPTPYSIRKTT

SEQ ID NO: 558 - protein, 48 aa, Unknown
  source: /note="Description of Unknown: NisCas7x3 sequence"
EARPFKLNGKHAIPATSLRGMLSSLFESVSNSNFRVLHPEHYSVRKSL

SEQ ID NO: 559 - protein, 48 aa, Unknown
  source: /note="Description of Unknown: GwCas7x3 sequence"
SLHPFKLNNGLAIPATSLRGMISSLFESVSNSNFRVLDEKTYSMRKTM

SEQ ID NO: 560 - protein, 48 aa, Unknown
  source: /note="Description of Unknown: HvmCas7x3 sequence"
EILPFTLGGKPAIPATSLRGMLSSIAEAASNSSLRVLEDKTLSYRKSM

SEQ ID NO: 561 - protein, 48 aa, Unknown
  source: /note="Description of Unknown: DsbCas7x3 sequence"
QVDHYTENGEIAIPATTLRGLLSSLSEAASNSSMRVLDDGMMSYRQPV

SEQ ID NO: 562 - protein, 48 aa, Unknown
  source: /note="Description of Unknown: GamCas7x3 sequence"
LRHPYQLDGEPAIPSTSLRGLISTMTEAAANCAMRVLDSEIISYRKPM

SEQ ID NO: 563 - protein, 48 aa, Unknown
  source: /note="Description of Unknown: DesCas7x3 sequence"
RIENYRLGNRIAIPAASLRGMLSSLAEAASNSAMRVLHQGILSYRKKA

SEQ ID NO: 564 - protein, 48 aa, Unknown
  source: /note="Description of Unknown: GabCas7x3 sequence"
LKEHYQLNNKLAIPATSLRGLISSLAEAASNSALRVLDNGVLSYRKPA

SEQ ID NO: 565 - protein, 48 aa, Unknown
  source: /note="Description of Unknown: MetCas7x3 sequence"
EINNYRLNGELAIPATSLRGMISSLAEAASNSAMRVLDNGLLSYRKTA

SEQ ID NO: 566 - protein, 48 aa, Unknown
  source: /note="Description of Unknown: MebCas7x3 sequence"
ELDNYRLNGQLAIPATSLRGMISSLAEAASNSAMRVLDNGLLSYRKDA

SEQ ID NO: 567 - protein, 48 aa, Unknown
  source: /note="Description of Unknown: GwCas7-11 sequence"
TQRFHQINDEIGLPGASLRGMVLSNYQILTNSCYRNLKATEEITRRMP

SEQ ID NO: 568 - protein, 48 aa, Unknown
  source: /note="Description of Unknown: HreCas7-11 sequence"
NYRFFRINDELAIPGSELRGMVSSVYEALTNSCFRIMEEGRYLSRRMG

SEQ ID NO: 569 - protein, 48 aa, Unknown
  source: /note="Description of Unknown: CmaCas7-11 sequence"
NYAFFRINDHIAIPGASIRGMISSVFETLTHSCFRVMDDKKYLTRRVI

SEQ ID NO: 570 - protein, 48 aa, Unknown
  source: /note="Description of Unknown: HvmCas7-11 sequence"
NYGFFRINGNVAIPGSSIRGMISSVFEALTNSCFRVFDQERYLSRSEK

SEQ ID NO: 571 - protein, 48 aa, Unknown
  source: /note="Description of Unknown: SmCas7-11 sequence"
NFPFFKINDEIMLPGAPLWAAVSQVYEALTNSCFRVMKQKRFLSWRME

SEQ ID NO: 572 - protein, 48 aa, Unknown
  source: /note="Description of Unknown: OmCas7-11 sequence"
EYPSFRLNNTPMIPGAGLRAAVSQVYEVLTNSCIRIMDQGQTLSWRMS

SEQ ID NO: 573 - protein, 48 aa, Unknown
  source: /note="Description of Unknown: DisCas7-11 sequence"
SYAFFRLHKQIMIPGSELRGMVSSVYETVTNSCFRIFDETKRLSWRMD

SEQ ID NO: 574 - protein, 48 aa, Unknown
  source: /note="Description of Unknown: DsbaCas7-11 sequence"
SYRFFTLNRVPMIPGSEIRGMISSVFEALSNSCFRIFDEKYRLSWRMD

SEQ ID NO: 575 - protein, 48 aa, Unknown
  source: /note="Description of Unknown: SstCas7-11 sequence"
SYAFFSVNGDIMLPGSEIRGMLSSVYEALTNSCFRVFDEGYRLSWRME

SEQ ID NO: 576 - protein, 48 aa, Unknown
  source: /note="Description of Unknown: SybCas7-11 sequence"
MCKFFSVAGKPMIPGSEIRGMISSVYEALTNSCFRVFDEEKYLTRRVQ

SEQ ID NO: 577 - protein, 48 aa, Unknown
  source: /note="Description of Unknown: CsbCas7-11 sequence"
NYKFFNINGELMIPGSELRGMLRTHFEALTKSCFAIFGEDSTLSWRMN

SEQ ID NO: 578 - protein, 48 aa, Unknown
  source: /note="Description of Unknown: CjcCas7-11 sequence"
NYQFFHINDEIMVPGSEIRGMISSVYEAITNSCFRVYDETKYITRRLS

SEQ ID NO: 579 - protein, 48 aa, Unknown
  source: /note="Description of Unknown: CbfCas7-11 sequence"
TYDFFQMNNAIMIPGSEIRGMISAVYEAMTNSCFRIFHEKQYLTRRIS

SEQ ID NO: 580 - protein, 48 aa, Unknown
  source: /note="Description of Unknown: HvsCas7-11 sequence"
YYHFLKIDNKPIIPGAEIRGAVSSIYEALTNSCFRVFGEKKVLSWRME

SEQ ID NO: 581 - protein, 48 aa, Unknown
  source: /note="Description of Unknown: HsmCas7-11 sequence"
VYKFFRLGGHLCIPAAEIRGMISSVYEALTNSCFRVFDEKRLISWRMT

SEQ ID NO: 582 - protein, 48 aa, Unknown
  source: /note="Description of Unknown: FmCas7-11 sequence"
SFRFFRIDDEVLIPGSEIRGMVSTVFEALTGSCFRVINQKAHLSWRIN

SEQ ID NO: 583 - protein, 48 aa, Unknown
  source: /note="Description of Unknown: DpbaCas7-11 sequence"
RFKFMRMGSQAAIPGSAIRSMTSSVFEALTNSCFRVLDQKSHLSWRME

SEQ ID NO: 584 - protein, 21 aa, Unknown
  source: /note="Description of Unknown: WmCas7x3 sequence"
EALSAIGRIVERNGELKLYPL

SEQ ID NO: 585 - protein, 23 aa, Unknown
  source: /note="Description of Unknown: NisCas7x3 sequence"
DYVALSAMGRIVDDQGELKLQPL

SEQ ID NO: 586 - protein, 21 aa, Unknown
  source: /note="Description of Unknown: GwCas7x3 sequence"
QSLSAMGRIVRHDQKLYLLPL

SEQ ID NO: 587 - protein, 31 aa, Unknown
  source: /note="Description of Unknown: HvmCas7x3 sequence"
ANRNEDKPLSALGMIKKIETGDKVEYRLLPL

SEQ ID NO: 588 - protein, 22 aa, Unknown
  source: /note="Description of Unknown: DsbCas7x3 sequence"
SGSLSAIGMVVIRDGKKFIYPL

SEQ ID NO: 589 - protein, 23 aa, Unknown
  source: /note="Description of Unknown: GamCas7x3 sequence"
PSHILSALGMVTKRGEDFWLIPL

SEQ ID NO: 590 - protein, 21 aa, Unknown
  source: /note="Description of Unknown: DesCas7x3 sequence"
NALREIGMIVLRDGKRFILPL

SEQ ID NO: 591 - protein, 21 aa, Unknown
  source: /note="Description of Unknown: GabCas7x3 sequence"
RALRKIGILFKREEQWRLVQM

SEQ ID NO: 592 - protein, 21 aa, Unknown
  source: /note="Description of Unknown: MetCas7x3 sequence"
DALRKVGMVIYVDNKSFIIKL

SEQ ID NO: 593 - protein, 22 aa, Unknown
  source: /note="Description of Unknown: MebCas7x3 sequence"
LALSKIGITFINRQGQWQLIPM

SEQ ID NO: 594 - protein, 27 aa, Unknown
  source: /note="Description of Unknown: GwCas7-11 sequence"
DEAKYRKAGRVTVSGDGAQKKYSIQEM

SEQ ID NO: 595 - protein, 20 aa, Unknown
  source: /note="Description of Unknown: HreCas7-11 sequence"
DEFKDFHPGIVVDGAKIREM

SEQ ID NO: 596 - protein, 39 aa, Unknown
  source: /note="Description of Unknown: CmaCas7-11 sequence"
ESETTQKRKSGRYQVEESDPDLFPGRVQKKGNKYKIEKM

SEQ ID NO: 597 - protein, 25 aa, Unknown
  source: /note="Description of Unknown: HvmCas7-11 sequence"
DPTELTKYYPGKVKRDGNKFFILKM

SEQ ID NO: 598 - protein, 21 aa, Unknown
  source: /note="Description of Unknown: SmCas7-11 sequence"
EDYKDFYPGRVLDGGKQIKKM

SEQ ID NO: 599 - protein, 21 aa, Unknown
  source: /note="Description of Unknown: OmCas7-11 sequence"
SEHKDYQPGKITDNGRKIQPM

SEQ ID NO: 600 - protein, 24 aa, Unknown
  source: /note="Description of Unknown: DisCas7-11 sequence"
DHQNVLQDFLPGRVTADGKHIQKF

SEQ ID NO: 601 - protein, 23 aa, Unknown
  source: /note="Description of Unknown: DsbaCas7-11 sequence"
DVKELEQFKPGRVADDGKRIEEM

SEQ ID NO: 602 - protein, 23 aa, Unknown
  source: /note="Description of Unknown: SstCas7-11 sequence"
DRNVLMQFKPGRVTDNGLRIEEM

SEQ ID NO: 603 - protein, 27 aa, Unknown
  source: /note="Description of Unknown: SybCas7-11 sequence"
KKGAKSSELVPGIIVWGQNGGLAVQQV

SEQ ID NO: 604 - protein, 45 aa, Unknown
  source: /note="Description of Unknown: CsbCas7-11 sequence"
DEKDYKIDSNSIRKMESQRNPKYRIPDELQKELRNSGNGLFNRLY

SEQ ID NO: 605 - protein, 37 aa, Unknown
  source: /note="Description of Unknown: CjcCas7-11 sequence"
EKKDESNDKNKSQDDASQKIRKGLVKKTDEGFSIIEV

SEQ ID NO: 606 - protein, 25 aa, Unknown
  source: /note="Description of Unknown: CbfCas7-11 sequence"
EDKELREFIPGIVRIINGDVYIEKA

SEQ ID NO: 607 - protein, 23 aa, Unknown
  source: /note="Description of Unknown: HvsCas7-11 sequence"
KDAKEFMPGRVSKKKGKLYMVKM

SEQ ID NO: 608 - protein, 36 aa, Unknown
  source: /note="Description of Unknown: HsmCas7-11 sequence"
EEAKRPDPKKSEEQNRMRFRPGRIIKKDKKFYAQEM

SEQ ID NO: 609 - protein, 23 aa, Unknown
  source: /note="Description of Unknown: FmCas7-11 sequence"
DMAKHYRPGRIIQNNEKMFIQPY

SEQ ID NO: 610 - protein, 23 aa, Unknown
  source: /note="Description of Unknown: DpbaCas7-11 sequence"
DDAGDYKPGRFEKKDDKAVIRKF

SEQ ID NO: 611 - protein, 1291 aa, Unknown; identical to SEQ ID NO: 23
  source: /note="Description of Unknown: WmCas7x3 sequence"

SEQ ID NO: 612 - protein, 1437 aa, Nitrosomonas sp.
MTDTVKSGRWIITGQFQLVTPMHIGTGLDEEMDKQSGESVDKKQNNSWIQAIALDLNKKPYIPGASIKGALKALARRYYCASNLNIFGDTIDTKDGDNKRKSVTVAGQAEFLNAWYAADQEDKPFDTITRVAIDRVTGTAEDRKLFNTRRVNPGVCFNYKIIIQNACETEIQYLLDLLRKAAKDPSFSLGAGANQSQGKVRCLSSCVRYFGKQEMHDWFRAIQNGKQEHWQIFAKPSNIKYADLERPDIIANSLNLPLTLDFHTPFLVKASKKKDEAKNEADAKPRTNHQGQVILPASSLRGRLRAQAEKILRTMGQDIPQGHAAPAYDGIAHRDLISLLFGTAGWKGIVCASDLIHSIPEYALQFNGVRETISDLSDTVKSCIIVDLVKTSTAAEKTEEQLHIRIVDSAGSLIVHKSENSSWANDTFRDASVKDNFKARLKEIADPQDLSDALRADIKKRAFQLATLTRHEMVAIDRFTGGGKEGAKFNVDYIECPTLTGAIYLDLHRLKQAQLKNDEDALKPALGLISLLLRDLAEGDIAFGFGANKGYGQCREHAVLDNWEERLKKIGAGLTIDGALQALRDTVALEPPAEFPPEIEKTTDDNQPEAPDFNLKPASNGFHNPYHFIPLNNPKIGDWPEAKAETLKANREGHDQYHTGKFSGRIVCSLTTQTPLFIGAETKPSTSDREPSEARPFKLNGKHAIPATSLRGMLSSLFESVSNSNFRVLHPEHYSVRKSLDDYVALSAMGRIVDDQGELKLQPLTLPTLFGNRNNVPAKWEKIFGTPSEDDFLRIYFDDIPSKFSSNKRYFYNCKATELKDFIKSDKYFIGKRTPTVFPKSSTEKSHLESLEFIDVEKFKKAVENLEITPGNNPYIHGWVRNLKDEFREDIPDNVKHHVFLPDTTKRVSPLEIPPHVKKRFHELADLALAGLHLKQGETIASPYKILPYTPIGRNKLENHIHRVPNDLTCYMTRLKKGDLVFFDVDNDGQITEISFSSIWRAGIGTKNKLQTTADLLSQRDPNLVQLGMGVRTKNTDRFKLSPAERLFGVVEHRDDDNTTVENVNQPNDKAQAFAFAGKVRIGFGLPDKKTTVNGVSPVTLKELSSPKPPSPAFYLKRKNNDDFVSKKVAAECSETMTLRGRKCYLHAWREQNGNVMKLDAIGVNSGGSTCKPPWKTHKPAANDQKEFEEDKNKFITSRQVKIAPISENTPFYFEIDFNNLDATELAQLCATLQPAPKFEHRLGMGKPLGLGSVKIEPVGLFLINRHQRYTTDSTNCDRYHYAWLKGEHAAWDWPEYFRQNVVTADCTQTFNDTFDKLVQNGLAGTDADIKHALQLLGDPQYIGVPVHYPIAGNSTLENKHFEWFGNNDKASVLRQKAQANSKNHHYQPKQQATPEEPQYLHTITKDSKQISLLKKNKIEDIENRDQQKHRYSNHRR

SEQ ID NO: 613 - protein, 1237 aa, Unknown; identical to SEQ ID NO: 22
  source: /note="Description of Unknown: GwCas7x3 sequence"

SEQ ID NO: 614 - protein, 1276 aa, Unknown; identical to SEQ ID NO: 30
  source: /note="Description of Unknown: Gammaproteobacteria bacterium sequence"

SEQ ID NO: 615 - protein, 1221 aa, Methylobacter tundripaludum
MNLPTWKLNNEKRWHISIVLTTATPLHIGSGEFCEHDDVKNNDGEPVKINACIKGSKGRPIIPGSTIKGKLYEWLKTRNTEENLLEKLFGKGHNSVSQDQGRGGKAEFHDAEIIEPLTGSQPWPYWREEHQAFIAASTAIDRHKQVALQQSLHYMETVPAGIRFKFTFTGVMRDEEAALLIAALDSFDKNQNQPCFGVDRANAYGRMELHGHLHVKVMGATEISSWLNSFSENDKKMAMESARNLEQQEINTLIEQGNALFKASCDEVKLGLTLKFKGPFLVNDPYAVKILSSNENAKTDHYPLLDKNRNPYLPVSSFRGVLRSQAERIIRTLGGKCCSTDDPCKPIFDKGDLSKLCLACQIFGASGWKTVINIHDFKAINKSKKTKQDFVAIDRFHGGGKDGAKFDATHFERPEFEGAISFSPRMANNDLDWGKGLLALVLRDMQEGDMTFGYGANKGYGGLESASITGIEQITSDIQAFRDKCVASPQTWLCDEAVKPANQQDKIPPAGIQVANSGFHNPYQFIPSKEPDTGHWLPVLGLNADSHHSHAFYRDQTDNGEKLYHGRLICCLNTETPIFIGADKKKDTEPAEINNYRLNGELAIPATSLRGMISSLAEAASNSAMRVLDNGLLSYRKTADDALRKVGMVIYVDNKSFIIKLNDAIKLKQTYTPGNMKDFIEKSNSWSPEHNTVYYLDNNQIPQESYMNGMKPGILRILGKEGREQELENKLHELFIPVPLEYVDTENNKFDYQAYKKAFLYRAIEIPEPVLKRYSELADQRTMSQKSNKELKKDDTCQSVGWLPFHLKGTKRQLDDKHNVGKLQIDEYDLIYYEASGKEVTEVAFSSIWRGRVETNSSQANKVYSFIPGELLPFNESRKKVSPAELLFGFTQINKDGSKADDKAQAFAGKVRISAGTISEYPENEANLLEQEVTLKALSTPKLPSPALYFRTINGNGSAYISKQELEPSKHLAKGRKYYLHALRTGDNKVQKLGSQGETANGGDSKLPWVTHNPDERPQLKVKIKPIKAEFIFSLDFNNLTEWELGLLCYALRPTDSFRHRIGMGKPLGLGSVKIDIMALQTINRQQRYAQDGLEENRFNRHNWVNPPHQPRLEKAGYSISLSSTPLNPEILRATFTKTMNADIYRTLELLGNPQNVKRPVHYPQVENHNIEQENYKWFVANDQGSGKGRNKIDPAEKALKILTENSDCLPTLSRLDWRDE

SEQ ID NO: 616 - protein, 1225 aa, Desulfobulbus sp.; identical to SEQ ID NO: 26

SEQ ID NO: 617 - protein, 1720 aa, Unknown; identical to SEQ ID NO: 19
  source: /note="Description of Unknown: HreCas7.11 sequence"

SEQ ID NO: 618 - protein, 1657 aa, Unknown; identical to SEQ ID NO: 4
  source: /note="Description of Unknown: CmaCas7.11 sequence"

SEQ ID NO: 619 - protein, 1723 aa, Unknown; identical to SEQ ID NO: 17
  source: /note="Description of Unknown: HvmCas7.11 sequence"

SEQ ID NO: 620 - protein, 1575 aa, Unknown; identical to SEQ ID NO: 21
  source: /note="Description of Unknown: SmCas7x3 sequence"

SEQ ID NO: 621 - protein, 1801 aa, Unknown; identical to SEQ ID NO: 24
  source: /note="Description of Unknown: oral_meta sequence"

SEQ ID NO: 622 - protein, 1601 aa, Unknown; identical to SEQ ID NO: 5
  source: /note="Description of Unknown: DisCas7.11 sequence"

SEQ ID NO: 623 - protein, 1659 aa, Unknown; identical to SEQ ID NO: 3
  source: /note="Description of Unknown: DsbaCas7.11 sequence"

SEQ ID NO: 624 - protein, 1652 aa, Unknown; identical to SEQ ID NO: 16
  source: /note="Description of Unknown: SstCas7.11 sequence"

SEQ ID NO: 625 - protein, 1717 aa, Unknown; identical to SEQ ID NO: 2
  source: /note="Description of Unknown: CsbCas7.11 sequence"

SEQ ID NO: 626 - protein, 1812 aa, Unknown; identical to SEQ ID NO: 1
  source: /note="Description of Unknown: CjcCas7.11 sequence"

SEQ ID NO: 627 - protein, 1573 aa, Unknown; identical to SEQ ID NO: 6
  source: /note="Description of Unknown: CbfCas7.11 sequence"

SEQ ID NO: 628 - protein, 1528 aa, Unknown; identical to SEQ ID NO: 15
  source: /note="Description of Unknown: HvsCas7.11 sequence"

SEQ ID NO: 629 - protein, 1548 aa, Unknown; identical to SEQ ID NO: 18
  source: /note="Description of Unknown: HsmCas7.11 sequence"

SEQ ID NO: 630 - protein, 1610 aa, Unknown; identical to SEQ ID NO: 20
  source: /note="Description of Unknown: FmCas7.11 sequence"

SEQ ID NO: 631 - protein, 1526 aa, Unknown; identical to SEQ ID NO: 7
  source: /note="Description of Unknown: DpbaCas7.11 sequence"

SEQ ID NO: 632 - protein, 1329 aa, Unknown
  source: /note="Description of Unknown: Syntrophorhabdaceae bacterium sequence"
MFPKGRQMRRQRLLGDAEYYGGTGREQPASIVISTDSDPDHKVYEWIITGQLKAETGFFFGTKAGAGGHTDLSILLGKDGHYRVPRSVFRGALRRDLRVAFGAGCRVEVGRERPCECPVCKVMRQITVMDTISSYREAPEIRQRIRLNPYTGTVDKGALFDMEVGPEGIEFPFVLRFRGSKSFPSELAAVIGSWTKGTAWLGGAAATGKGRFSLLGLSIHKWNLSTAEGRKSYLAAYGLRDAADKTVKRLSIDKGGKGDVGLPAGLERDALPSSVREPLWKKLVCTVDFSSPLLLADPIAALLGVEGDERIGFDNIAYEKRRYNGETNTTESIPAVKGETFRGIVRTALGKRHGNLTRDHEDCRCRLCAVFGKEQEAGKIRFEDLMPVGAWTRKHLDHVAIDRFHGGAEENMKFDTYALAASPTNPLRMKGLIWVRSDLFETGHDGPTPPYVKDIIDALADVKRGLYPVGGKTGSGYGWIKDVTIDGLPQGLSLPPAEERVDGVNEVPPYNYSAPPDLPSAAEGEYFFPHVFIKPYDKVDRVSRLTGHDRFRQGRITGRITCTLKTLTPLIIPDSEGIQTDATGHKMCKFFSVAGKPMIPGSEIRGMISSVYEALTNSCFRVFDEEKYLTRRVQPKKGAKSSELVPGIIVWGQNGGLAVQQVKNAYRVPLYDDPAVTSAIPTEAQKNKERWESVPSVNLQGALDWNLTTANIARDNRTFLNSRPEEKDAILSGTKPISFELEGTNPNDMLVRLVPDGVDGAHSGYLKFTGLNMVLKANKKTSRKLAPSEEDVRTLAILHNDFDSRRDWRRPPNSQRYFPRSVLRFSLERSTYTIPKRCERVFEGTCGEPYSVPSDVERQYNSIIDDISKNYGRISETYLTKTANRKLTVGDLVYFIADLDKNMATHILPVFISRISDEKPLGELLPFSGKLIPCEGEPPTILKKMAPSLLTEAWRTLISTHLEGFCPACRLFGTTSYKGRIRFGFAEHTGTPKWLREELDWARPFLTLPIQERPRPTWSVPDDKSEVPGRKFYLHHHGGNRIVESNLRNRPEVNQTKNNSSVEPISAGNTFTFDVCFENLEAWELGLLLYCLELSPKLAHKLGRAKAFGFGSVKIHVERIEERTTDGAYQDVTAVKKNGWITTGHDKLREWFHRDDWEDVDHIRNLRTVLRFPDADQEHDVRYPELKANNGVSGYVELRDKMTASERQESLRTPWYRWFPQNGTGGSGRHEQAATSQEQDTAKDESVLSATQRRQAVIDVSDPDERLSGTVESFDRQKGDGYIGCGVRQFYVRLEDIRSRTALCEGQVVTFRARKEWEGHEAYDVEIDQ

SEQ ID NO: 633 - RNA, 45 nt, Artificial Sequence
  source: /note="Description of Artificial Sequence: Synthetic oligonucleotide"
  modified_base (15)..(45): a, c, u, g, unknown or other
ugaugucacggaacnnnnnnnnnnnnnnnnnnnnnnnnnnnnnnn

SEQ ID NO: 634 - RNA, 35 nt, Artificial Sequence
  source: /note="Description of Artificial Sequence: Synthetic oligonucleotide"
gguuggaaagccgguuuucuuugaugucacggaac

SEQ ID NO: 635 - DNA, 54 bp, Artificial Sequence
  source: /note="Description of Artificial Sequence: Synthetic oligonucleotide"
  modified_base (10)..(15): a, c, t, g, unknown or other
  modified_base (47)..(52): a, c, t, g, unknown or other
ctagaaatannnnnntggattacttggtagaacaccaatctactcgnnnnnnac

SEQ ID NO: 636 - DNA, 31 bp, Artificial Sequence
  source: /note="Description of Artificial Sequence: Synthetic oligonucleotide"
cgagtagattggtgttctaccaagtaatcca

SEQ ID NO: 637 - RNA, 36 nt, Artificial Sequence
  source: /note="Description of Artificial Sequence: Synthetic oligonucleotide"
guuuggaagccgggucgaagucaggcccguuaagac

SEQ ID NO: 638 - RNA, 36 nt, Artificial Sequence
  source: /note="Description of Artificial Sequence: Synthetic oligonucleotide"
cuugaagacuaaaggaaggaauuaaugucacgguac

SEQ ID NO: 639 - RNA, 45 nt, Artificial Sequence
  source: /note="Description of Artificial Sequence: Synthetic oligonucleotide"
auugaaugcagaguagaggccgcaggauaguuuagaacauucuau

SEQ ID NO: 640 - DNA, 46 bp, Artificial Sequence
  source: /note="Description of Artificial Sequence: Synthetic oligonucleotide"
  source: /note="Description of Combined DNA/RNA Molecule: Synthetic oligonucleotide"
gttgatgtcacggaacucuaaaccauccugcggccucuacucugca

SEQ ID NO: 641 - DNA, 101 bp, Artificial Sequence
  source: /note="Description of Artificial Sequence: Synthetic polynucleotide"
ggttggaaagccggttttctttgatgtcacggaacctttgttgtcttcgacatgggtaatcctcatggttggaaagccggttttctttgatgtcacggaac

SEQ ID NO: 642 - DNA, 65 bp, Artificial Sequence
  source: /note="Description of Artificial Sequence: Synthetic oligonucleotide"
gttggaaagccggttttctttgatgtcacggaaccgagtagattgctgttctaccaagtaatcca

SEQ ID NO: 643 - DNA, 46 bp, Artificial Sequence
  source: /note="Description of Artificial Sequence: Synthetic oligonucleotide"
ttgatgtcacggaacctttgttgtcttcgacatgggtaatcctcat

SEQ ID NO: 644 - RNA, 37 nt, Artificial Sequence
  source: /note="Description of Artificial Sequence: Synthetic oligonucleotide"
  modified_base (16)..(37): a, c, u, g, unknown or other
uuaaugucacgguacnnnnnnnnnnnnnnnnnnnnnn

SEQ ID NO: 645 - DNA, 50 bp, Artificial Sequence
  source: /note="Description of Artificial Sequence: Synthetic oligonucleotide"
caggttcctggaactggaatctctttccatagaatgttctaaaccatcct

SEQ ID NO: 646 - DNA, 50 bp, Artificial Sequence
  source: /note="Description of Artificial Sequence: Synthetic oligonucleotide"
accaggttcctggaactggaatctctttccatagaatgttctaaaccatc

SEQ ID NO: 647 - DNA, 50 bp, Artificial Sequence
  source: /note="Description of Artificial Sequence: Synthetic oligonucleotide"
gtaccaggttcctggaactggaatctctttccatagaatgttctaaacca

1. A composition that cleaves an RNA target comprising a guide RNA that specifically hybridizes to the RNA target, and a polypeptide comprising an amino acid sequence 85-100% identical to an amino acid sequence selected from the group consisting of SEQ ID NOs: 1-32 and 632.

2. (canceled)

3. The composition of claim 1, wherein the polypeptide comprises a glutamate at a position corresponding to position 70 of SEQ ID NO:1; aspartate at a position corresponding to position 429 of SEQ ID NO:1; aspartate at a position corresponding to position 487 of SEQ ID NO:1; and/or an aspartate at a position corresponding to position 654 of SEQ ID NO:1.

4. The composition of claim 1, wherein the polypeptide comprises an amino acid sequence 90% identical to the amino acid sequence of SEQ ID NO:1.

5. The composition of claim 1, wherein the polypeptide comprises an amino acid sequence 95% identical to the amino acid sequence of SEQ ID NO:1.

6. The composition of claim 1, wherein the polypeptide comprises an amino acid sequence 99% identical to the amino acid sequence of SEQ ID NO:1.

7. The composition of claim 1, wherein the polypeptide is the amino acid sequence of SEQ ID NO:1.

8. (canceled)

9. The composition of claim 1, wherein the guide RNA has a sequence with a length of from about 20 to about 53 nucleotides (nt), or from about 25 to about 53 nt, or from about 29 to about 53 nt or from about 40 to about 50 nt.

10. The composition of claim 1, wherein the guide RNA is a pre-crRNA.

11. The composition of claim 1, wherein the guide RNA is a mature crRNA.

12. The composition of claim 1, wherein the RNA target is a single-strand RNA (ssRNA).

13. The composition of claim 1, wherein the RNA target is in a cell comprising a prokaryotic cell or a eukaryotic cell.

14. (canceled)

15. (canceled)

16. The composition of claim 13, wherein the eukaryotic cell is a mammalian cell.

17. The composition of claim 16, wherein the mammalian cell is a human cell.

18. The composition of claim 1, wherein the polypeptide further comprises a deaminase domain for programmable RNA base editing.

19. The composition of claim 18, wherein the deaminase is selected from the group consisting of an adenosine deaminase, a cytidine deaminase, and a catalytic domain thereof.

20. The composition of claim 18, wherein the deaminase is an adenosine deaminase.

21. The composition of claim 18, wherein the deaminase domain comprises an amino acid sequence 85% identical to an amino acid sequence selected from the group consisting of SEQ ID NOs: 25-42.

22. (canceled)

23. The composition of claim 1, wherein the guide RNA comprises a mismatch that is about 20 to about 30 nucleotides from the non-pairing C of the guide RNA.

24. The composition of claim 1 wherein the polypeptide is encoded by a nucleic acid molecule.

25. The composition of claim 24, wherein the guide RNA is encoded by a nucleic acid molecule.

26. (canceled)

27. A vector comprising the nucleic acid molecule of claim 24.

28. A cell comprising the composition of claim 1.

29. The cell of claim 28, wherein the cell is a prokaryotic cell or a eukaryotic cell.

30. (canceled)

31. The cell of claim 28, wherein the eukaryotic cell is a mammalian cell.

32. The cell of claim 28, wherein the mammalian cell is a human cell.

33. A method of cleaving an RNA target in a cell comprising providing to the cell the composition of claim 1.

34. A method of stabilizing an RNA target in a cell comprising providing to the cell the composition of claim 1.

35. A method of affecting translation of an RNA target in a cell comprising providing to the cell the composition of claim 1.

36. The method of claim 33, wherein the RNA target is an ssRNA.

37. A method of treating a genetically inherited disease in a subject in need thereof comprising administering to the subject an effective amount of the composition of claim 1, wherein the genetically inherited disease involves a guanosine to adenosine change in a genome of the subject.

38. The method of claim 37, wherein the genetically inherited disease is selected from the group consisting of Meier-Gorlin syndrome; Seckel syndrome 4; Joubert syndrome 5; Leber congenital amaurosis 10; Charcot-Marie-Tooth disease, type 2; leukoencephalopathy; Usher syndrome, type 2C; spinocerebellar ataxia 28; glycogen storage disease type III; primary hyperoxaluria, type I; long QT syndrome 2; Sjogren-Larsson syndrome; hereditary fructosuria; neuroblastoma; amyotrophic lateral sclerosis type 9; Kallmann syndrome 1; limb-girdle muscular dystrophy, type 2L; familial adenomatous polyposis 1; familial type 3 hyperlipoproteinemia; Alzheimer's disease, type 1; metachromatic leukodystrophy; and cancer.

39. (canceled)

40. A method of altering splicing of a pre-mRNA in a cell comprising administering to the cell an effective amount of the composition of claim 1.

41. (canceled)

42. (canceled)

43. A method of modulating translation in a cell comprising administering to the cell an effective amount of the composition of claim 1.

44. A method of detecting a bacterium or derivative thereof in a sample, the method comprising:
adding to the sample an effective amount of the composition of claim 1; and
detecting a reporter specific to the bacterium or derivative thereof.

45. A method of detecting a virus or derivative thereof in a sample, the method comprising:
adding to the sample an effective amount of the composition of claim 1; and
detecting a reporter specific to the virus or derivative thereof.
